(19) United States
(12) Patent Application Publication
(10) Pub. No.: US 2023/0332144 A1
(43) Pub. Date: Oct. 19, 2023

(54) METHODS AND COMPOSITIONS FOR PRIME EDITING NUCLEOTIDE SEQUENCES

(71) Applicants: The Broad Institute, Inc., Cambridge, MA (US); President and Fellows of Harvard College, Cambridge, MA (US)

(72) Inventors: David R. Liu, Cambridge, MA (US); Andrew Vito Anzalone, Cambridge, MA (US); Gregory Newby, Cambridge, MA (US); Kelcee Everette, Cambridge, MA (US)

(73) Assignees: The Broad Institute, Inc., Cambridge, MA (US); President and Fellows of Harvard College, Cambridge, MA (US)

(21) Appl. No.: 18/323,245

(22) Filed: May 24, 2023

Related U.S. Application Data
(63) Continuation of application No. 17/751,599, filed on May 23, 2022.
Application No. 17/751,599 is a continuation of application No. 17/219,672, filed on Mar. 31, 2021, now Pat. No. 11,447,770.
Application No. 17/219,672 is a continuation of application No. PCT/US2020/023712, filed on Mar. 19, 2020.
(60) Provisional application No. 63/100,548, filed on Mar. 17, 2020.
(60) Provisional application No. 62/991,069, filed on Mar. 17, 2020.
(60) Provisional application No. 62/944,231, filed on Dec. 5, 2019.
(60) Provisional application No. 62/974,537, filed on Dec. 5, 2019.
(60) Provisional application No. 62/931,195, filed on Nov. 5, 2019.
(60) Provisional application No. 62/913,553, filed on Oct. 10, 2019.
(60) Provisional application No. 62/973,558, filed on Oct. 10, 2019.
(60) Provisional application No. 62/889,996, filed on Aug. 21, 2019.
(60) Provisional application No. 62/922,654, filed on Aug. 21, 2019.
(60) Provisional application No. 62/858,958, filed on Jun. 7, 2019.
(60) Provisional application No. 62/820,813, filed on Mar. 19, 2019.

(51) Int. Cl. C12N 15/11; C12N 9/12; C12N 9/22; C12N 15/90; C07K 14/00; C12N 15/62

(52) U.S. Cl. CPC C12N 15/11; C12N 9/1276; C12N 9/22; C12N 15/907; C12Y 207/07049; C07K 14/001; C12N 15/62; C12N 15/902; C12N 2310/20; C07K 2319/00; C12N 2310/3519; C12N 2310/3517; C12N 2800/80

(57) ABSTRACT

Compositions and methods are provided herein for conducting prime editing of a target DNA molecule (e.g., a genome) that enables the incorporation of a nucleotide change and/or targeted mutagenesis. The compositions include fusion proteins comprising nucleic acid programmable DNA binding proteins (napDNAbp) and a polymerase (e.g., reverse transcriptase), which is guided to a specific DNA sequence by a modified guide RNA, named a PEgRNA. The PEgRNA has been altered (relative to a standard guide RNA) to comprise an extended portion that provides a DNA synthesis template sequence which encodes a single strand DNA flap which is synthesized by the polymerase of the fusion protein and which becomes incoporated into the target DNA molecule.

### RELATED APPLICATIONS AND INCORPORATION BY REFERENCE

[0001] This application is a continuation of, and claims priority under 35 U.S.C. § 120 to, U.S. patent application U.S. Ser. No. 17/219,672, filed Mar. 31, 2021, which claims priority under 35 U.S.C. §§ 120 and 365(c) to and is a continuation of International PCT Application PCT/US2020/023712, filed Mar. 19, 2020, which claims priority under 35 U.S.C. § 119(e) to U.S. Provisional Application No. 62/820,813, filed Mar. 19, 2019 (Attorney Docket No. B1195.70074US00), U.S. Provisional Application No. 62/858,958 (Attorney Docket No. B1195.70074US01), filed Jun. 7, 2019, U.S. Provisional Application No. 62/889,996 (Attorney Docket No. B1195.70074US02), filed Aug. 21, 2019, U.S. Provisional Application No. 62/922,654, filed Aug. 21, 2019 (Attorney Docket No. B1195.70083US00), U.S. Provisional Application No. 62/913,553 (Attorney Docket No. B1195.70074US03), filed Oct. 10, 2019, U.S. Provisional Application No. 62/973,558 (Attorney Docket No. B1195.70083US01), filed Oct. 10, 2019, U.S. Provisional Application No. 62/931,195 (Attorney Docket No. B1195.70074US04), filed Nov. 5, 2019, U.S. Provisional Application No. 62/944,231 (Attorney Docket No. B1195.70074US05), filed Dec. 5, 2019, U.S. Provisional Application No. 62/974,537 (Attorney Docket No. B1195.70083US02), filed Dec. 5, 2019, U.S. Provisional Application No. 62/991,069 (Attorney Docket No. B1195.70074US06), filed Mar. 17, 2020, and U.S. Provisional Application No. 63/100,548 (Attorney Docket No. B1195.70083US03), filed Mar. 17, 2020, the entire contents of each of which is incorporated herein by reference.

### GOVERNMENT SUPPORT

[0002] This invention was made with government support under grant numbers U01AI142756, RM1HG009490, R01EB022376, and R35GM118062 awarded by the National Institutes of Health. The government has certain rights in the invention.

### REFERENCE TO A SEQUENCE LISTING SUBMITTED AS A TEXT FILE VIA EFS-WEB

[0003] This application contains a Sequence Listing which has been submitted in ASCII format via EFS-Web and is hereby incorporated by reference in its entirety. Said ASCII copy, created on Apr. 3, 2023, is named B119570098US01-SUBSEQ-TNG.txt and is 2,894,004 bytes in size.

### BACKGROUND OF THE INVENTION

[0004] Pathogenic single nucleotide mutations contribute to approximately 50% of human diseases for which there is a genetic component,⁷ according to some estimates. Unfortunately, treatment options for patients with these genetic disorders remain extremely limited, despite decades of gene therapy exploration⁸. Perhaps the most parsimonious solution to this therapeutic challenge is direct correction of single nucleotide mutations in patient genomes, which would address the root cause of disease and would likely provide lasting benefit. Although such a strategy was previously unthinkable, recent improvements in genome editing capabilities brought about by the advent of the CRISPR/Cas system⁹ have now brought this therapeutic approach within reach. By straightforward design of a guide RNA (gRNA) sequence that contains ˜20 nucleotides complementary to the target DNA sequence, nearly any conceivable genomic site can be specifically accessed by CRISPR associated (Cas) nucleases^{1,2}. To date, several monomeric bacterial Cas nuclease systems have been identified and adapted for genome editing applications¹⁰. This natural diversity of Cas nucleases, along with a growing collection of engineered variants¹¹⁻¹⁴, offers fertile ground for developing new genome editing technologies.

[0005] While gene disruption with CRISPR is now a mature technique, precision editing of single base pairs in the human genome remains a major challenge³. Homology directed repair (HDR) has long been used in human cells and other organisms to insert, correct, or exchange DNA sequences at sites of double strand breaks (DSBs) using donor DNA repair templates that encode the desired edits¹⁵. However, traditional HDR has very low efficiency in most human cell types, particularly in non-dividing cells, and competing non-homologous end joining (NHEJ) leads predominantly to insertion-deletion (indel) byproducts¹⁶. Other issues relate to the generation of DSBs, which can give rise to large chromosomal rearrangements and deletions at target loci¹⁷, or activate the p53 axis leading to growth arrest and apoptosis^{18,19}.

[0006] Several approaches have been explored to address these drawbacks of HDR. For example, repair of single-stranded DNA breaks (nicks) with oligonucleotide donors has been shown to reduce indel formation, but yields of desired repair products remain low²⁰. Other strategies attempt to bias repair toward HDR over NHEJ using small molecule and biologic reagents²¹⁻²³. However, the effectiveness of these methods is likely cell-type dependent, and perturbation of the normal cell state could lead to undesirable and unforeseeable effects.

[0007] Recently, the inventors, led by Prof. David Liu et al., developed base editing as a technology that edits target nucleotides without creating DSB s or relying on HDR^{4-6,24-27}. Direct modification of DNA bases by Cas-fused deaminase enzymes allows for C●G to T●A, or A●T to G●C, base pair conversions in a short target window (˜5-7 bases) with very high efficiency. As a result, base editors have been rapidly adopted by the scientific community. However, the following factors limit their generality for precision genome editing: (1) “bystander editing” of non-target C or A bases within the target window are observed; (2) target nucleotide product mixtures are observed; (3) target bases must be located 15±2 nucleotides upstream of a PAM sequence; and (5) repair of small insertion and deletion mutations is not possible.

[0008] Therefore, the development of programmable editors that are flexibly capable of introducing any desired single nucleotide change and/or which could install base pair insertions or deletions (e.g., at least 1, 2, 3, 4, 5, 6, 8, 9, 10, 11, 12, 13, 14, 15, 16, 17, 18, 19, 20, 30, 40, 50, 60, 70, 80, 90, 100, or more base pair insertions or deletions) and/or which could alter or modify the nucleotide sequence at a target site with high specificity and efficiency would substantially expand the scope and therapeutic potential of genome editing technologies based on CRISPR.

### SUMMARY OF THE INVENTION

[0009] The present invention describes an entirely new platform for genome editing called “prime editing.” Prime editing is a versatile and precise genome editing method that directly writes new genetic information into a specified DNA site using a nucleic acid programmable DNA binding protein (“napDNAbp”) working in association with a polymerase (i.e., in the form of a fusion protein or otherwise provided in trans with the napDNAbp), wherein the prime editing system is programmed with a prime editing (PE) guide RNA (“PEgRNA”) that both specifies the target site and templates the synthesis of the desired edit in the form of a replacement DNA strand by way of an extension (either DNA or RNA) engineered onto a guide RNA (e.g., at the 5′ or 3′ end, or at an internal portion of a guide RNA). The replacement strand containing the desired edit (e.g., a single nucleobase substitution) shares the same sequence as the endogenous strand of the target site to be edited (with the exception that it includes the desired edit). Through DNA repair and/or replication machinery, the endogenous strand of the target site is replaced by the newly synthesized replacement strand containing the desired edit. In some cases, prime editing may be thought of as a “search-and-replace” genome editing technology since the prime editors, as described herein, not only search and locate the desired target site to be edited, but at the same time, encode a replacement strand containing a desired edit which is installed in place of the corresponding target site endogenous DNA strand.

[0010] The prime editors of the present disclosure relate, in part, to the discovery that the mechanism of target-primed reverse transcription (TPRT) or “prime editing” can be leveraged or adapted for conducting precision CRISPR/Cas-based genome editing with high efficiency and genetic flexibility (e.g., as depicted in various embodiments of FIGS. 1A-1F). TPRT is naturally used by mobile DNA elements, such as mammalian non-LTR retrotransposons and bacterial Group II introns^{28,29}. The inventors have herein used Cas protein-reverse transcriptase fusions or related systems to target a specific DNA sequence with a guide RNA, generate a single strand nick at the target site, and use the nicked DNA as a primer for reverse transcription of an engineered reverse transcriptase template that is integrated with the guide RNA. However, while the concept begins with prime editors that use reverse transcriptases as the DNA polymerase component, the prime editors described herein are not limited to reverse transcriptases but may include the use of virtually and DNA polymerase. Indeed, while the application throughout may refer to prime editors with “reverse transcriptases,” it is set forth here that reverse transcriptases are only one type of DNA polymerase that may work with prime editing. Thus, wherever the specification mentions “reverse transcriptases,” the person having ordinary skill in the art should appreciate that any suitable DNA polymerase may be used in place of the reverse transcriptase. Thus, in one aspect, the prime editors may comprise Cas9 (or an equivalent napDNAbp) which is programmed to target a DNA sequence by associating it with a specialized guide RNA (i.e., PEgRNA) containing a spacer sequence that anneals to a complementary protospacer in the target DNA. The specialized guide RNA also contains new genetic information in the form of an extension that encodes a replacement strand of DNA containing a desired genetic alteration which is used to replace a corresponding endogenous DNA strand at the target site. To transfer information from the PEgRNA to the target DNA, the mechanism of prime editing involves nicking the target site in one strand of the DNA to expose a 3′-hydroxyl group. The exposed 3′-hydroxyl group can then be used to prime the DNA polymerization of the edit-encoding extension on PEgRNA directly into the target site. In various embodiments, the extension—which provides the template for polymerization of the replacement strand containing the edit—can be formed from RNA or DNA. In the case of an RNA extension, the polymerase of the prime editor can be an RNA-dependent DNA polymerase (such as, a reverse transcriptase). In the case of a DNA extension, the polymerase of the prime editor may be a DNA-dependent DNA polymerase.

[0011] The newly synthesized strand (i.e., the replacement DNA strand containing the desired edit) that is formed by the herein disclosed prime editors would be homologous to the genomic target sequence (i.e., have the same sequence as) except for the inclusion of a desired nucleotide change (e.g., a single nucleotide change, a deletion, or an insertion, or a combination thereof). The newly synthesized (or replacement) strand of DNA may also be referred to as a single strand DNA flap, which would compete for hybridization with the complementary homologous endogenous DNA strand, thereby displacing the corresponding endogenous strand. In certain embodiments, the system can be combined with the use of an error-prone reverse transcriptase enzyme (e.g., provided as a fusion protein with the Cas9 domain, or provided in trans to the Cas9 domain). The error-prone reverse transcriptase enzyme can introduce alterations during synthesis of the single strand DNA flap. Thus, in certain embodiments, error-prone reverse transcriptase can be utilized to introduce nucleotide changes to the target DNA. Depending on the error-prone reverse transcriptase that is used with the system, the changes can be random or non-random.

[0012] Resolution of the hybridized intermediate (comprising the single strand DNA flap synthesized by the reverse transcriptase hybridized to the endogenous DNA strand) can include removal of the resulting displaced flap of endogenous DNA (e.g., with a 5′ end DNA flap endonuclease, FEN1), ligation of the synthesized single strand DNA flap to the target DNA, and assimilation of the desired nucleotide change as a result of cellular DNA repair and/or replication processes. Because templated DNA synthesis offers single nucleotide precision for the modification of any nucleotide, including insertions and deletions, the scope of this approach is very broad and could foreseeably be used for myriad applications in basic science and therapeutics.

[0013] In one aspect, the specification provides a fusion protein comprising a nucleic acid programmable DNA binding protein (napDNAbp) and a reverse transcriptase. In various embodiments, the fusion protein is capable of carrying out genome editing by target-primed reverse transcription in the presence of an extended guide RNA.

[0014] In certain embodiments, the napDNAbp has a nickase activity. The napDNAbp may also be a Cas9 protein or functional equivalent thereof, such as a nuclease active Cas9, a nuclease inactive Cas9 (dCas9), or a Cas9 nickase (nCas9).

[0015] In certain embodiments, the napDNAbp is selected from the group consisting of: Cas9, Cas12e, Cas12d, Cas12a, Cas12b1, Cas13a, Cas12c, and Argonaute and optionally has a nickase activity.

[0016] In other embodiments, the fusion protein when complexed with an extended guide RNA is capable of binding to a target DNA sequence.

[0017] In still other embodiments, the target DNA sequence comprises a target strand and a complementary non-target strand.

[0018] In other embodiments, the binding of the fusion protein complexed to the extended guide RNA forms an R-loop. The R-loop can comprise (i) an RNA-DNA hybrid comprising the extended guide RNA and the target strand, and (ii) the complementary non-target strand.

[0019] In still other embodiments, the complementary non-target strand is nicked to form a reverse transcriptase priming sequence having a free 3′ end.

[0020] In various embodiments, the extended guide RNA comprises (a) a guide RNA and (b) an RNA extension at the 5′ or the 3′ end of the guide RNA, or at an intramolecular location in the guide RNA. The RNA extension can comprise (i) a reverse transcription template sequence comprising a desired nucleotide change, (ii) a reverse transcription primer binding site, and (iii) optionally, a linker sequence. In various embodiments, the reverse transcription template sequence may encode a single-strand DNA flap that is complementary to an endogenous DNA sequence adjacent to the nick site, wherein the single-strand DNA flap comprises the desired nucleotide change.

[0021] In various embodiments, the RNA extension is at least 5 nucleotides, at least 6 nucleotides, at least 7 nucleotides, at least 8 nucleotides, at least 9 nucleotides, at least 10 nucleotides, at least 11 nucleotides, at least 12 nucleotides, at least 13 nucleotides, at least 14 nucleotides, at least 15 nucleotides, at least 16 nucleotides, at least 17 nucleotides, at least 18 nucleotides, at least 19 nucleotides, at least 20 nucleotides, at least 21 nucleotides, at least 22 nucleotides, at least 23 nucleotides, at least 24 nucleotides, or at least 25 nucleotides in length.

[0022] In still other embodiments, the single-strand DNA flap may hybridize to the endogenous DNA sequence adjacent to the nick site, thereby installing the desired nucleotide change. In still other embodiments, the single-stranded DNA flap displaces the endogenous DNA sequence adjacent to the nick site and which has a free 5′ end. In certain embodiments, the displaced endogenous DNA having the 5′ end is excised by the cell.

[0023] In various embodiments, the cellular repair of the single-strand DNA flap results in installation of the desired nucleotide change, thereby forming a desired product.

[0024] In various other embodiments, the desired nucleotide change is installed in an editing window that is between about −4 to +10 of the PAM sequence.

[0025] In still other embodiments, the desired nucleotide change is installed in an editing window that is between about −5 to +5 of the nick site, or between about −10 to +10 of the nick site, or between about −20 to +20 of the nick site, or between about −30 to +30 of the nick site, or between about −40 to +40 of the nick site, or between about −50 to +50 of the nick site, or between about −60 to +60 of the nick site, or between about −70 to +70 of the nick site, or between about −80 to +80 of the nick site, or between about −90 to +90 of the nick site, or between about −100 to +100 of the nick site, or between about −200 to +200 of the nick site.

[0026] In various embodiments, the napDNAbp comprises an amino acid sequence of SEQ ID NO: 18. In various other embodiments, the napDNAbp comprises an amino acid sequence that is at least 80%, 85%, 90%, 95%, 98%, or 99% identical to the amino acid sequence of any one of SEQ ID NOs: 26-39, 42-61, 75-76, 126, 130, 137, 141, 147, 153, 157, 445, 460, 467, and 482-487 (Cas9); (SpCas9); SEQ ID NO: 77-86 (CP-Cas9); SEQ ID NO: 18-25 and 87-88 (SpCas9); and SEQ ID NOs: 62-72(Cas12)

[0027] In other embodiments, the reverse transcriptase of the disclosed fusion proteins and/or compositions may comprise any one of the amino acid sequences of SEQ ID NOs: 89-100, 105-122, 128-129, 132, 139, 143, 149, 154, 159, 235, 454, 471, 516, 662, 700-716, 739-742, and 766. In still other embodiments, the reverse transcriptase may comprise an amino acid sequence that is at least 80%, 85%, 90%, 95%, 98%, or 99% identical to the amino acid sequence of any one of SEQ ID NOs: 89-100, 105-122, 128-129, 132, 139, 143, 149, 154, 159, 235, 454, 471, 516, 662, 700-716, 739-742, and 766. These sequences may be naturally occurring reverse transcriptase sequences, e.g., from a retrovirus or a retrotransposon, of the sequences may be recombinant.

[0028] In various other embodiments, the fusion proteins herein disclosed may comprise various structural configurations. For example, the fusion proteins may comprise the structure NH₂-[napDNAbp]-[reverse transcriptase]-COOH; or NH₂-[reverse transcriptase]-[napDNAbp]-COOH, wherein each instance of “]-[” indicates the presence of an optional linker sequence.

[0029] In various embodiments, the linker sequence comprises an amino acid sequence of SEQ ID NOs: 127, 165-176, 446, 453, and 767-769, or an amino acid sequence that this at least 80%, 85%, or 90%, or 95%, or 99% identical to any one of the linker amino acid sequence of SEQ ID NOs: 127, 165-176, 446, 453, and 767-769.

[0030] In various embodiments, the desired nucleotide change that is incorporated into the target DNA can be a single nucleotide change (e.g., a transition or transversion), an insertion of one or more nucleotides, or a deletion of one or more nucleotides.

[0031] In certain cases, the insertion is at least 1, at least 2, at least 3, at least 4, at least 5, at least 6, at least 7, at least 8, at least 9, at least 10, at least 11, at least 12, at least 13, at least 14, at least 15, at least 16, at least 17, at least 18, at least 19, at least 20, at least 30, at least 40, at least 50, at least 60, at least 70, at least 80, at least 90, at least 100, at least 200, at least 300, at least 400, or at least 500 nucleotides in length.

[0032] In certain other cases, the deletion is at least 1, at least 2, at least 3, at least 4, at least 5, at least 6, at least 7, at least 8, at least 9, at least 10, at least 11, at least 12, at least 13, at least 14, at least 15, at least 16, at least 17, at least 18, at least 19, at least 20, at least 30, at least 40, at least 50, at least 60, at least 70, at least 80, at least 90, at least 100, at least 200, at least 300, at least 400, or at least 500 nucleotides in length.

[0033] In another aspect, the present disclosure provides an extended guide RNA comprising a guide RNA and at least one RNA extension. The RNA extension can be positioned at the 3′ end of the guide RNA. In other embodiments, the RNA extension can be positioned at the 5′ of the guide RNA. In still other embodiments, the RNA extension can be positioned at an intramolecular position within the guide RNA, however, preferable, the intramolecular positioning of the extended portion does not disrupt the functioning of the protospacer.

[0034] In various embodiments, the extended guide RNA is capable of binding to a napDNAbp and directing the napDNAbp to a target DNA sequence. The target DNA sequence can comprise a target strand and a complementary non-target strand, wherein the guide RNA hybridizes to the target strand to form an RNA-DNA hybrid and an R-loop.

[0035] In various embodiments of the extended guide RNA, the at least one RNA extension can comprise a reverse transcription template sequence. In various other embodiment, the RNA extension may further comprises a reverse transcription primer binding site. In still further embodiments, the RNA extension may comprise a linker or spacer sequence that joins the RNA extension to the guide RNA.

[0036] In various embodiments, the RNA extension can be at least 5 nucleotides, at least 6 nucleotides, at least 7 nucleotides, at least 8 nucleotides, at least 9 nucleotides, at least 10 nucleotides, at least 11 nucleotides, at least 12 nucleotides, at least 13 nucleotides, at least 14 nucleotides, at least 15 nucleotides, at least 16 nucleotides, at least 17 nucleotides, at least 18 nucleotides, at least 19 nucleotides, at least 20 nucleotides, at least 21 nucleotides, at least 22 nucleotides, at least 23 nucleotides, at least 24 nucleotides, at least 25 nucleotides, at least 30 nucleotides, at least 40 nucleotides, at least 50 nucleotides, at least 60 nucleotides, at least 70 nucleotides, at least 80 nucleotides, at least 90 nucleotides, at least 100 nucleotides, at least 150 nucleotides, at least 200 nucleotides, at least 300 nucleotides, at least 400 nucleotides, or at least 500 nucleotides in length.

[0037] In other embodiments, the reverse transcription template sequence is at least 3 nucleotides, at least 4 nucleotides, at least 5 nucleotides, at least 6 nucleotides, at least 7 nucleotides, at least 8 nucleotides, at least 9 nucleotides, at least 10 nucleotides, at least 11 nucleotides, at least 12 nucleotides, at least 13 nucleotides, at least 14 nucleotides, at least 15 nucleotides, at least 16 nucleotides, at least 17 nucleotides, at least 18 nucleotides, at least 19 nucleotides, at least 20 nucleotides, at least 30 nucleotides, at least 40 nucleotides, at least 50 nucleotides, at least 60 nucleotides, at least 70 nucleotides, at least 80 nucleotides, at least 90 nucleotides, at least 100 nucleotides, at least 200 nucleotides, at least 300 nucleotides, at least 400 nucleotides, or at least 500 nucleotides in length.

[0038] In still other embodiments, wherein the reverse transcription primer binding site sequence is at least 3 nucleotides, at least 4 nucleotides, at least 5 nucleotides, at least 6 nucleotides, at least 7 nucleotides, at least 8 nucleotides, at least 9 nucleotides, at least 10 nucleotides, at least 11 nucleotides, at least 12 nucleotides, at least 13 nucleotides, at least 14 nucleotides, at least 15 nucleotides, at least 16 nucleotides, at least 17 nucleotides, at least 18 nucleotides, at least 19 nucleotides, at least 20 nucleotides, at least 30 nucleotides, at least 40 nucleotides, at least 50 nucleotides, at least 60 nucleotides, at least 70 nucleotides, at least 80 nucleotides, at least 90 nucleotides, at least 100 nucleotides, at least 200 nucleotides, at least 300 nucleotides, at least 400 nucleotides, or at least 500 nucleotides in length.

[0039] In other embodiments, the optional linker or spacer sequence is at least 3 nucleotides, at least 4 nucleotides, at least 5 nucleotides, at least 6 nucleotides, at least 7 nucleotides, at least 8 nucleotides, at least 9 nucleotides, at least 10 nucleotides, at least 11 nucleotides, at least 12 nucleotides, at least 13 nucleotides, at least 14 nucleotides, at least 15 nucleotides, at least 16 nucleotides, at least 17 nucleotides, at least 18 nucleotides, at least 19 nucleotides, at least 20 nucleotides, at least 30 nucleotides, at least 40 nucleotides, at least 50 nucleotides, at least 60 nucleotides, at least 70 nucleotides, at least 80 nucleotides, at least 90 nucleotides, at least 100 nucleotides, at least 200 nucleotides, at least 300 nucleotides, at least 400 nucleotides, or at least 500 nucleotides in length.

[0040] In various embodiments of the extended guide RNAs, the reverse transcription template sequence may encode a single-strand DNA flap that is complementary to an endogenous DNA sequence adjacent to a nick site, wherein the single-strand DNA flap comprises a desired nucleotide change. The single-stranded DNA flap may displace an endogenous single-strand DNA at the nick site. The displaced endogenous single-strand DNA at the nick site can have a 5′ end and form an endogenous flap, which can be excised by the cell. In various embodiments, excision of the 5′ end endogenous flap can help drive product formation since removing the 5′ end endogenous flap encourages hybridization of the single-strand 3′ DNA flap to the corresponding complementary DNA strand, and the incorporation or assimilation of the desired nucleotide change carried by the single-strand 3′ DNA flap into the target DNA.

[0041] In various embodiments of the extended guide RNAs, the cellular repair of the single-strand DNA flap results in installation of the desired nucleotide change, thereby forming a desired product.

[0042] In certain embodiments, the PEgRNA comprises the nucleotide sequence of SEQ ID NOs: 101-104, 131, 181-183, 222-234, 237-244, 277, 324-330, 332, 334, 336, 338, 340, 342, 344, 346, 348, 350, 352, 354, 356, 358, 360, 362, 364, 366, 368, 394, 429-442, 499-505, 641-649, 678-692, 735-736, 738, 757-761, 776-777, 2997-3103, 3113-3121, 3305-3455, 3479-3493, 3522-3540, 3549-3556, 3628-3698, 3755-3810, 3874, 3890-3901, 3905-3911, 3913-3929, and 3972-3989, or a nucleotide sequence having at least 85%, or at least 90%, or at least 95%, or at least 98%, or at least 99% sequence identity with any one of SEQ ID NOs: 101-104, 181-183, 223-234, 237-244, 277, 324-330, 332, 334, 336, 338, 340, 342, 344, 346, 348, 350, 352, 354, 356, 358, 360, 362, 364, 366, 368, 394, 429-442, 499-505, 641-649, 678-692, 735-736, 757-761, 776-777, 2997-3103, 3113-3121, 3305-3455, 3479-3493, 3522-3540, 3549-3556, 3628-3698, 3755-3810, 3874, 3890-3901, 3905-3911, 3913-3929, and 3972-3989.

[0043] In yet another aspect of the invention, the specification provides for complexes comprising a fusion protein described herein and any extended guide RNA described above.

[0044] In still other aspects of the invention, the specification provides a complex comprising a napDNAbp and an extended guide RNA. The napDNAbp can be a Cas9 nickase, or can be an amino acid sequence of SEQ ID NOs: 42-57 (Cas9 nickase) and 65 (AsCas12a nickase), or an amino acid sequence that is at least 80%, 85%, 90%, 95%, 98%, or 99% identical to the amino acid sequence of any one of SEQ ID NOs: 42-57 (Cas9 nickase) and 65 (AsCas12a nickase).

[0045] In various embodiments involving a complex, the extended guide RNA is capable of directing the napDNAbp to a target DNA sequence. In various embodiments, a reverse transcriptase may be provided in trans, i.e., provided from a different source than the complex itself. For example, a reverse transcriptase could be provided to the same cell having the complex by introducing a separate vector separately encoding the reverse transcriptase.

[0046] In yet another aspect, the specification provides polynucleotides. In certain embodiments, the polynucleotides may encode any of the fusion proteins disclosed herein. In certain other embodiments, the polynucleotides may encode any of the napDNAbps disclosed herein. In still further embodiments, the polynucleotides may encode any of the reverse transcriptases disclosed herein. In yet other embodiments, the polynucleotides may encode any of the extended guide RNAs disclosed herein, any of the reverse transcription template sequences, or any of the reverse transcription primer sites, or any of the optional linker sequences.

[0047] In still other aspects, the specification provides vectors comprising the polynucleotides described herein. Thus, in certain embodiments, the vectors comprise polynucleotides for encoding the fusion proteins comprising a napDNAbp and a reverse transcriptase. In other embodiments, the vectors comprise polynucleotides that separately encode a napDNAbp and reverse transcriptase. In still other embodiments, the vectors may comprise polynucleotides that encode the extended guide RNAs. In various embodiments, the vectors may comprise one or more polynucleotides that encode napDNAbps, reverse transcriptase, and extended guide RNAs on the same or separate vectors.

[0048] In still other aspects, the specification provides cells comprising a fusion protein as described herein and an extended guide RNA. The cells may be transformed with the vectors comprising the fusion proteins, napDNAbps, reverse transcriptase, and extended guide RNAs. These genetic elements may be comprised on the same vectors or on different vectors.

[0049] In yet another aspect, the specification provides pharmaceutical compositions. In certain embodiments, the pharmaceutical compositions comprise one or more of a napDNAbp, a fusion protein, a reverse transcriptase, and an extended guide RNA. In certain embodiments, the fusion protein described herein and a pharmaceutically acceptable excipient. In other embodiments, the pharmaceutical compositions comprise any extend guide RNA described herein and a pharmaceutically acceptable excipient. In still other embodiments, the pharmaceutical compositions comprise any extend guide RNA described herein in combination with any fusion protein described herein and a pharmaceutically acceptable excipient. In yet other embodiments, the pharmaceutical compositions comprise any polynucleotide sequence encoding one or more of a napDNAbp, a fusion protein, a reverse transcriptase, and an extended guide RNA. In still other embodiments, the various components disclosed herein may be separated into one or more pharmaceutical compositions. For example, a first pharmaceutical composition may comprise a fusion protein or a napDNAbp, a second pharmaceutical compositions may comprise a reverse transcriptase, and a third pharmaceutical composition may comprise an extended guide RNA.

[0050] In still a further aspect, the present disclosure provides kits. In one embodiment, the kit comprises one or more polynucleotides encoding one or more components, including a fusion protein, a napDNAbp, a reverse transcriptase, and an extended guide RNA. The kits may also comprise vectors, cells, and isolated preparations of polypeptides, including any fusion protein, napDNAbp, or reverse transcriptase disclosed herein.

[0051] In yet another aspect, the present disclosure provides for methods of using the disclosed compositions of matter.

[0052] In one embodiment, the methods relate to a method for installing a desired nucleotide change in a double-stranded DNA sequence. The method first comprises contacting the double-stranded DNA sequence with a complex comprising a fusion protein and an extended guide RNA, wherein the fusion protein comprises a napDNAbp and a reverse transcriptase and wherein the extended guide RNA comprises a reverse transcription template sequence comprising the desired nucleotide change. Next, the method involves nicking the double-stranded DNA sequence on the non-target strand, thereby generating a free single-strand DNA having a 3′ end. The method then involves hybridizing the 3′ end of the free single-strand DNA to the reverse transcription template sequence, thereby priming the reverse transcriptase domain. The method then involves polymerizing a strand of DNA from the 3′ end, thereby generating a single-strand DNA flap comprising the desired nucleotide change. Then, the method involves replacing an endogenous DNA strand adjacent the cut site with the single-strand DNA flap, thereby installing the desired nucleotide change in the double-stranded DNA sequence.

[0053] In other embodiments, the disclosure provides for a method for introducing one or more changes in the nucleotide sequence of a DNA molecule at a target locus, comprising contacting the DNA molecule with a nucleic acid programmable DNA binding protein (napDNAbp) and a guide RNA which targets the napDNAbp to the target locus, wherein the guide RNA comprises a reverse transcriptase (RT) template sequence comprising at least one desired nucleotide change. Next, the method involves forming an exposed 3′ end in a DNA strand at the target locus and then hybridizing the exposed 3′ end to the RT template sequence to prime reverse transcription. Next, a single strand DNA flap comprising the at least one desired nucleotide change based on the RT template sequence is synthesized or polymerized by reverse transcriptase. Lastly, the at least one desired nucleotide change is incorporated into the corresponding endogenous DNA, thereby introducing one or more changes in the nucleotide sequence of the DNA molecule at the target locus.

[0054] In still other embodiments, the disclosure provides a method for introducing one or more changes in the nucleotide sequence of a DNA molecule at a target locus by target-primed reverse transcription, the method comprising: (a) contacting the DNA molecule at the target locus with a (i) fusion protein comprising a nucleic acid programmable DNA binding protein (napDNAbp) and a reverse transcriptase and (ii) a guide RNA comprising an RT template comprising a desired nucleotide change; (b) conducting target-primed reverse transcription of the RT template to generate a single strand DNA comprising the desired nucleotide change; and (c) incorporating the desired nucleotide change into the DNA molecule at the target locus through a DNA repair and/or replication process.

[0055] In certain embodiments, the step of replacing the endogenous DNA strand comprises: (i) hybridizing the single-strand DNA flap to the endogenous DNA strand adjacent the cut site to create a sequence mismatch; (ii) excising the endogenous DNA strand; and (iii) repairing the mismatch to form the desired product comprising the desired nucleotide change in both strands of DNA.

[0056] In various embodiments, the desired nucleotide change can be a single nucleotide substitution (e.g., and transition or a transversion change), a deletion, or an insertion. For example, the desired nucleotide change can be (1) a G to T substitution, (2) a G to A substitution, (3) a G to C substitution, (4) a T to G substitution, (5) a T to A substitution, (6) a T to C substitution, (7) a C to G substitution, (8) a C to T substitution, (9) a C to A substitution, (10) an A to T substitution, (11) an A to G substitution, or (12) an A to C substitution.

[0057] In other embodiments, the desired nucleoid change can convert (1) a G:C basepair to a T:A basepair, (2) a G:C basepair to an A:T basepair, (3) a G:C basepair to C:G basepair, (4) a T:A basepair to a G:C basepair, (5) a T:A basepair to an A:T basepair, (6) a T:A basepair to a C:G basepair, (7) a C:G basepair to a G:C basepair, (8) a C:G basepair to a T:A basepair, (9) a C:G basepair to an A:T basepair, (10) an A:T basepair to a T:A basepair, (11) an A:T basepair to a G:C basepair, or (12) an A:T basepair to a C:G basepair.

[0058] In still other embodiments, the method introduces a desired nucleotide change that is an insertion. In certain cases, the insertion is at least 1, at least 2, at least 3, at least 4, at least 5, at least 6, at least 7, at least 8, at least 9, at least 10, at least 11, at least 12, at least 13, at least 14, at least 15, at least 16, at least 17, at least 18, at least 19, at least 20, at least 30, at least 40, at least 50, at least 60, at least 70, at least 80, at least 90, at least 100, at least 200, at least 300, at least 400, or at least 500 nucleotides in length.

[0059] In other embodiments, the method introduces a desired nucleotide change that is a deletion. In certain other cases, the deletion is at least 1, at least 2, at least 3, at least 4, at least 5, at least 6, at least 7, at least 8, at least 9, at least 10, at least 11, at least 12, at least 13, at least 14, at least 15, at least 16, at least 17, at least 18, at least 19, at least 20, at least 30, at least 40, at least 50, at least 60, at least 70, at least 80, at least 90, at least 100, at least 200, at least 300, at least 400, or at least 500 nucleotides in length.

[0060] In various embodiments, the desired nucleotide change corrects a disease-associated gene. The disease-associated gene can be associated with a monogenetic disorder selected from the group consisting of: Adenosine Deaminase (ADA) Deficiency; Alpha-1 Antitrypsin Deficiency; Cystic Fibrosis; Duchenne Muscular Dystrophy; Galactosemia; Hemochromatosis; Huntington's Disease; Maple Syrup Urine Disease; Marfan Syndrome; Neurofibromatosis Type 1; Pachyonychia Congenita; Phenylkeotnuria; Severe Combined Immunodeficiency; Sickle Cell Disease; Smith-Lemli-Opitz Syndrome; and Tay-Sachs Disease. In other embodiments, the disease-associated gene can be associated with a polygenic disorder selected from the group consisting of: heart disease; high blood pressure; Alzheimer's disease; arthritis; diabetes; cancer; and obesity.

[0061] The methods disclosed herein may involve fusion proteins having a napDNAbp that is a nuclease dead Cas9 (dCas9), a Cas9 nickase (nCas9), or a nuclease active Cas9. In other embodiments, a napDNAbp and reverse transcriptase are not encoded as a single fusion protein, but rather can be provided in separate constructs. Thus, in some embodiments, the reverse transcriptase can be provided in trans relative to the napDNAbp (rather than by way of a fusion protein).

[0062] In various embodiments involving methods, the napDNAbp may comprise an amino acid sequence of SEQ ID NOs: 26-61, 75-76, 126, 130, 137, 141, 147, 153, 157, 445, 460, 467, and 482-487 (Cas9); (SpCas9); SEQ ID NO: 77-86 (CP-Cas9); SEQ ID NO: 18-25 and 87-88 (SpCas9); and SEQ ID NOs: 62-72(Cas12). The napDNAbp may also comprise an amino acid sequence that is at least 80%, 85%, 90%, 95%, 98%, or 99% identical to the amino acid sequence of any one of SEQ ID NOs: 26-61, 75-76, 126, 130, 137, 141, 147, 153, 157, 445, 460, 467, and 482-487 (Cas9); (SpCas9); SEQ ID NO: 77-86 (CP-Cas9); SEQ ID NO: 18-25 and 87-88 (SpCas9); and SEQ ID NOs: 62-72(Cas12).

[0063] In various embodiments involving methods, the reverse transcriptase may comprise any one of the amino acid sequences of SEQ ID NOs: 89-100, 105-122, 128-129, 132, 139, 143, 149, 154, 159, 235, 454, 471, 516, 662, 700-716, 739-742, and 766. The reverse transcriptase may also comprise an amino acid sequence that is at least 80%, 85%, 90%, 95%, 98%, or 99% identical to the amino acid sequence of any one of SEQ ID NOs: 89-100, 105-122, 128-129, 132, 139, 143, 149, 154, 159, 235, 454, 471, 516, 662, 700-716, 739-742, and 766.

[0064] The methods may involve the use of a PEgRNA comprising a nucleotide sequence of SEQ ID NOs: 101-104, 131, 181-183, 222-234, 237-244, 277, 324-330, 332, 334, 336, 338, 340, 342, 344, 346, 348, 350, 352, 354, 356, 358, 360, 362, 364, 366, 368, 394, 429-442, 499-505, 641-649, 678-692, 735-736, 738, 757-761, 776-777, 2997-3103, 3113-3121, 3305-3455, 3479-3493, 3522-3540, 3549-3556, 3628-3698, 3755-3810, 3874, 3890-3901, 3905-3911, 3913-3929, and 3972-3989, or a nucleotide sequence having at least 80%, or at least 85%, or at least 90%, or at least 95%, or at least 99% sequence identity thereto. The methods may comprise the use of extended guide RNAs that comprise an RNA extension at the 3′ end, wherein the RNA extension comprises the reverse transcription template sequence.

[0065] The methods may comprise the use of extended guide RNAs that comprise an RNA extension at the 5′ end, wherein the RNA extension comprises the reverse transcription template sequence.

[0066] The methods may comprise the use of extended guide RNAs that comprise an RNA extension at an intramolecular location in the guide RNA, wherein the RNA extension comprises the reverse transcription template sequence.

[0067] The methods may comprise the use of extended guide RNAs having one or more RNA extensions that are at least 1, at least 2, at least 3, at least 4, at least 5, at least 6, at least 7, at least 8, at least 9, at least 10, at least 11, at least 12, at least 13, at least 14, at least 15, at least 16, at least 17, at least 18, at least 19, at least 20, at least 30, at least 40, at least 50, at least 60, at least 70, at least 80, at least 90, at least 100, at least 200, at least 300, at least 400, or at least 500 nucleotides in length.

[0068] It should be appreciated that the foregoing concepts, and additional concepts discussed below, may be arranged in any suitable combination, as the present disclosure is not limited in this respect. Further, other advantages and novel features of the present disclosure will become apparent from the following detailed description of various non-limiting embodiments when considered in conjunction with the accompanying figures.

### BRIEF DESCRIPTION OF THE DRAWINGS

[0069] The following drawings form part of the present specification and are included to further demonstrate certain aspects of the present disclosure, which can be better understood by reference to one or more of these drawings in combination with the detailed description of specific embodiments presented herein.

[0070] FIG. 1A provides a schematic of an exemplary process for introducing a single nucleotide change, and/or insertion, and/or deletion into a DNA molecule (e.g., a genome) using a fusion protein comprising a reverse transcriptase fused to a Cas9 protein in complex with an extended guide RNA molecule. In this embodiment, the guide RNA is extended at the 3′ end to include a reverse transcriptase template sequence. The schematic shows how a reverse transcriptase (RT) fused to a Cas9 nickase, in a complex with a guide RNA (gRNA), binds the DNA target site and nicks the PAM-containing DNA strand adjacent to the target nucleotide. The RT enzyme uses the nicked DNA as a primer for DNA synthesis from the gRNA, which is used as a template for the synthesis of a new DNA strand that encodes the desired edit. The editing process shown may be referred to as target-primed reverse transcription editing (TRT editing) or equivalently, “prime editing.”

[0071] FIG. 1B provides the same representation as in FIG. 1A, except that the prime editor complex is represented more generally as [napDNAbp]-[P]:PEgRNA or [P]-[napDNAbp]:PEgRNA, wherein “P” refers to any polymerase (e.g., a reverse transcriptase), “napDNAbp” refers to a nucleic acid programmable DNA binding protein (e.g., SpCas9), and “PEgRNA” refers to a prime editing guide RNA, and “]-[“refers to an optional linker. As described elsewhere, e.g., FIGS. 3A-3G, the PEgRNA comprises an 5′ extension arm comprising a primer binding site and a DNA synthesis template. Although not shown, it is contemplated that the extension arm of the PEgRNA (i.e., which comprises a primer binding site and a DNA synthesis template) can be DNA or RNA. The particular polymerase contemplated in this configuration will depend upon the nature of the DNA synthesis template. For instance, if the DNA synthesis template is RNA, then the polymerase case be an RNA-dependent DNA polymerase (e.g., reverse transcriptase). If the DNA synthesis template is DNA, then the polymerase can be a DNA-dependent DNA polymerase.

[0072] FIG. 1C provides a schematic of an exemplary process for introducing a single nucleotide change, and/or insertion, and/or deletion into a DNA molecule (e.g., a genome) using a fusion protein comprising a reverse transcriptase fused to a Cas9 protein in complex with an extended guide RNA molecule. In this embodiment, the guide RNA is extended at the 5′ end to include a reverse transcriptase template sequence. The schematic shows how a reverse transcriptase (RT) fused to a Cas9 nickase, in a complex with a guide RNA (gRNA), binds the DNA target site and nicks the PAM-containing DNA strand adjacent to the target nucleotide. The RT enzyme uses the nicked DNA as a primer for DNA synthesis from the gRNA, which is used as a template for the synthesis of a new DNA strand that encodes the desired edit. The editing process shown may be referred to as target-primed reverse transcription editing (TRT editing) or equivalently, “prime editing.”

[0073] FIG. 1D provides the same representation as in FIG. 1C, except that the prime editor complex is represented more generally as [napDNAbp]-[P]:PEgRNA or [P]-[napDNAbp]:PEgRNA, wherein “P” refers to any polymerase (e.g., a reverse transcriptase), “napDNAbp” refers to a nucleic acid programmable DNA binding protein (e.g., SpCas9), and “PEgRNA” refers to a prime editing guide RNA, and “]-[” refers to an optional linker. As described elsewhere, e.g., FIGS. 3A-3G, the PEgRNA comprises an 3′ extension arm comprising a primer binding site and a DNA synthesis template. Although not shown, it is contemplated that the extension arm of the PEgRNA (i.e., which comprises a primer binding site and a DNA synthesis template) can be DNA or RNA. The particular polymerase contemplated in this configuration will depend upon the nature of the DNA synthesis template. For instance, if the DNA synthesis template is RNA, then the polymerase case be an RNA-dependent DNA polymerase (e.g., reverse transcriptase). If the DNA synthesis template is DNA, then the polymerase can be a DNA-dependent DNA polymerase. In various embodiments, the PEgRNA can be engineered or synthesized to incorporate a DNA-based DNA synthesis template.

[0074] FIG. 1E is a schematic depicting an exemplary process of how the synthesized single strand of DNA (which comprises the desired nucleotide change) becomes resolved such that the desired nucleotide change is incorporated into the DNA. As shown, following synthesis of the edited strand (or “mutagenic strand”), equilibration with the endogenous strand, flap cleavage of the endogenous strand, and ligation leads to incorporation of the DNA edit after resolution of the mismatched DNA duplex through the action of endogenous DNA repair and/or replication processes.

[0075] FIG. 1F is a schematic showing that “opposite strand nicking” can be incorporated into the resolution method of FIG. 1E to help drive the formation of the desired product versus the reversion product. In opposite strand nicking, a second Cas9/gRNA complex is used to introduce a second nick on the opposite strand from the initial nicked strand. This induces the endogenous cellular DNA repair and/or replication processes to preferentially replace the unedited strand (i.e., the strand containing the second nick site).

[0076] FIG. 1G provides another schematic of an exemplary process for introducing a single nucleotide change, and/or insertion, and/or deletion into a DNA molecule (e.g., a genome) of a target locus using a nucleic acid programmable DNA binding protein (napDNAbp) complexed with an extended guide RNA. This process may be referred to as an embodiment of prime editing. The extended guide RNA comprises an extension at the 3′ or 5′ end of the guide RNA, or at an intramolecular location in the guide RNA. In step (a), the napDNAbp/gRNA complex contacts the DNA molecule and the gRNA guides the napDNAbp to bind to the target locus. In step (b), a nick in one of the strands of DNA (the R-loop strand, or the PAM-containing strand, or the non-target DNA strand, or the protospacer strand) of the target locus is introduced (e.g., by a nuclease or chemical agent), thereby creating an available 3′ end in one of the strands of the target locus. In certain embodiments, the nick is created in the strand of DNA that corresponds to the R-loop strand, i.e., the strand that is not hybridized to the guide RNA sequence. In step (c), the 3′ end DNA strand interacts with the extended portion of the guide RNA in order to prime reverse transcription. In certain embodiments, the 3′ ended DNA strand hybridizes to a specific RT priming sequence on the extended portion of the guide RNA. In step (d), a reverse transcriptase is introduced which synthesizes a single strand of DNA from the 3′ end of the primed site towards the 3′ end of the guide RNA. This forms a single-strand DNA flap comprising the desired nucleotide change (e.g., the single base change, insertion, or deletion, or a combination thereof). In step (e), the napDNAbp and guide RNA are released. Steps (f) and (g) relate to the resolution of the single strand DNA flap such that the desired nucleotide change becomes incorporated into the target locus. This process can be driven towards the desired product formation by removing the corresponding 5′ endogenous DNA flap that forms once the 3′ single strand DNA flap invades and hybridizes to the complementary sequence on the other strand. The process can also be driven towards product formation with second strand nicking, as exemplified in FIG. 1F. This process may introduce at least one or more of the following genetic changes: transversions, transitions, deletions, and insertions.

[0077] FIG. 1H is a schematic depicting the types of genetic changes that are possible with the prime editing processes described herein. The types of nucleotide changes achievable by prime editing include deletions (including short and long deletions), single-nucleotide changes (including transitions and transversions), inversions, and insertions (including short and long deletions).

[0078] FIG. 1I is a schematic depicting temporal second strand nicking exemplified by PE3b (PE3b=PE2 prime editor fusion protein+PEgRNA+second strand nicking guide RNA). Temporal second strand nicking is a variant of second strand nicking in order to facilitate the formation of the desired edited product. The “temporal” term refers to the fact that the second-strand nick to the unedited strand occurs only after the desired edit is installed in the edited strand. This avoids concurrent nicks on both strands to lead to double-stranded DNA breaks.

[0079] FIGS. 1J-1K depict a variation of prime editing contemplated herein that replaces the napDNAbp (e.g., SpCas9 nickase) with any programmable nuclease domain, such as zinc finger nucleases (ZFN) or transcription activator-like effector nucleases (TALEN). As such, it is contemplated that suitable nucleases do not necessarily need to be “programmed” by a nucleic acid targeting molecule (such as a guide RNA), but rather, may be programmed by defining the specificity of a DNA-binding domain, such as and in particular, a nuclease. Just as in prime editing with napDNAbp moieties, it is preferable that such alternative programmable nucleases be modified such that only one strand of a target DNA is cut. In other words, the programmable nucleases should function as nickases, preferably. Once a programmable nuclease is selected (e.g., a ZFN or a TALEN), then additional functionalities may be engineered into the system to allow it to operate in accordance with a prime editing-like mechanism. For example, the programmable nucleases may be modified by coupling (e.g., via a chemical linker) an RNA or DNA extension arm thereto, wherein the extension arm comprises a primer binding site (PBS) and a DNA synthesis template. The programmable nuclease may also be coupled (e.g., via a chemical or amino acid linker) to a polymerase, the nature of which will depend upon whether the extension arm is DNA or RNA. In the case of an RNA extension arm, the polymerase can be an RNA-dependent DNA polymerase (e.g., reverse transcriptase). In the case of a DNA extension arm, the polymerase can be a DNA-dependent DNA polymerase (e.g., a prokaryotic polymerase, including Pol I, Pol II, or Pol III, or a eukaryotic polymerase, including Pol a, Pol b, Pol g, Pol d, Pol e, or Pol z). The system may also include other functionalities added as fusions to the programmable nucleases, or added in trans to facilitate the reaction as a whole (e.g., (a) a helicase to unwind the DNA at the cut site to make the cut strand with the 3′ end available as a primer, (b) a flap endonuclease (e.g., FEN1) to help remove the endogenous strand on the cut strand to drive the reaction towards replacement of the endogenous strand with the synthesized strand, or (c) a nCas9:gRNA complex to create a second site nick on the opposite strand, which may help drive the integration of the synthesize repair through favored cellular repair of the non-edited strand). In an analogous manner to prime editing with a napDNAbp, such a complex with an otherwise programmable nuclease could be used to synthesize and then install a newly synthesized replacement strand of DNA carrying an edit of interest permanently into a target site of DNA.

[0080] FIG. 1L depicts, in one embodiment, the anatomical features of a target DNA that may be edited by prime editing. The target DNA comprises a “non-target strand” and a “target strand.” The target-strand is the strand that becomes annealed to the spacer of a PEgRNA of a prime editor complex that recognizes the PAM site (in this case, NGG, which is recognized by the canonical SpCas9-based prime editors) The target strand may also be referred to as the “non-PAM strand” or the “non-edit strand.” By contrast, the non-target strand (i.e., the strand containing the protospacer and the PAM sequence of NGG) may be referred to as the “PAM-strand” or the “edit strand.” In various embodiments, the nick site of the PE complex will be in the protospacer on the PAM-strand (e.g., with the SpCas9-based PE). The location of the nick will be characteristic of the particular Cas9 that forms the PE. For example, with an SpCas9-based PE, the nick site in the phosphodiester bond between bases three (“−3” position relative to the position 1 of the PAM sequence) and four (“−4” position relative to position 1 of the PAM sequence). The nick site in the protospacer forms a free 3′ hydroxyl group, which as seen in the following figures, complexes with the primer binding site of the extension arm of the PEgRNA and provides the substrate to begin polymerization of a single strand of DNA code for by the DNA synthesis template of the extension arm of the PEgRNA. This polymerization reaction is catalyzed by the polymerase (e.g., reverse transcriptase) of the PE fusion protein in the 5′ to 3′ direction. Polymerization terminates before reaching the gRNA core (e.g., by inclusion of a polymerization termination signal, or secondary structure, which functions to terminate the polymerization activity of PE), producing a single strand DNA flap that is extended from the original 3′ hydroxyl group of the nicked PAM strand. The DNA synthesis template codes for a single strand DNA that is homologous to the endogenous 5′-ended single strand of DNA that immediately follows the nick site on the PAM strand and incorporates the desired nucleotide change (e.g., single base substitution, insertion, deletion, inversion). The position of the desired edit can be in any position following downstream of the nick site on the PAM strand, which can include position +1, +2, +3, +4 (the start of the PAM site), +5 (position 2 of the PAM site), +6 (position 3 of the PAM site), +7, +8, +9, +10, +11, +12, +13, +14, +15, +16, +17, +18, +19, +20, +21, +22, +23, +24, +25, +26, +27, +28, +29, +30, +31, +32, +33, +34, +35, +36, +37, +38, +39, +40, +41, +42, +43, +44, +45, +46, +47, +48, +49, +50, +51, +52, +53, +54, +55, +56, +57, +58, +59, +60, +61, +62, +63, +64, +65, +66, +67, +68, +69, +70, +71, +72, +73, +74, +75, +76, +77, +78, +79, +80, +81, +82, +83, +84, +85, +86, +87, +88, +89, +90, +91, +92, +93, +94, +95, +96, +97, +98, +99, +100, +101, +102, +103, +104, +105, +106, +107, +108, +109, +110, +111, +112, +113, +114, +115, +116, +117, +118, +119, +120, +121, +122, +123, +124, +125, +126, +127, +128, +129, +130, +131, +132, +133, +134, +135, +136, +137, +138, +139, +140, +141, +142, +143, +144, +145, +146, +147, +148, +149, or +150, or more (relative to the downstream position of the nick site). Once the 3′ end single stranded DNA (containing the edit of interest) replaces the endogenous 5′ end single stranded DNA, the DNA repair and replication processes will result in permanent installation of the edit site on the PAM strand, and then correction of the mismatch on the non-PAM strand that will exist at the edit site. In this way, the edit will extend to both strands of DNA on the target DNA site. It will be appreciated that reference to “edited strand” and “non-edited” strand only intends to delineate the strands of DNA involved in the PE mechanism. The “edited strand” is the strand that first becomes edited by replacement of the 5′ ended single strand DNA immediately downstream of the nick site with the synthesized 3′ ended single stranded DNA containing the desired edit. The “non-edited” strand is the strand pair with the edited strand, but which itself also becomes edited through repair and/or replication to be complementary to the edited strand, and in particular, the edit of interest.

[0081] FIG. 1M depicts the mechanism of prime editing showing the anatomical features of the target DNA, prime editor complex, and the interaction between the PEgRNA and the target DNA. First, a prime editor comprising a fusion protein having a polymerase (e.g., reverse transcriptase) and a napDNAbp (e.g., SpCas9 nickase, e.g., a SpCas9 having a deactivating mutation in an HNH nuclease domain (e.g., H840A) or a deactivating mutation in a RuvC nuclease domain (D10A)) is complexed with a PEgRNA and DNA having a target DNA to be edited. The PEgRNA comprises a spacer, gRNA core (aka gRNA scaffold or gRNA backbone) (which binds to the napDNAbp), and an extension arm. The extension arm can be at the 3′ end, the 5′ end, or somewhere within the PEgRNA molecule. As shown, the extension arm is at the 3′ end of the PEgRNA. The extension arm comprises in the 3′ to 5′ direction a primer binding site and a DNA synthesis template (comprising both an edit of interest and regions of homology (i.e., homology arms) that are homologous with the 5′ ended single stranded DNA immediately following the nick site on the PAM strand. As shown, once the nick is introduced thereby producing a free 3′ hydroxyl group immediately upstream of the nick site, the region immediately upstream of the nick site on the PAM strand anneals to a complementary sequence at the 3′ end of the extension arm referred to as the “primer binding site,” creating a short double-stranded region with an available 3′ hydroxyl end, which forms a substrate for the polymerase of the prime editor complex. The polymerase (e.g., reverse transcriptase) then polymerase as strand of DNA from the 3′ hydroxyl end to the end of the extension arm. The sequence of the single stranded DNA is coded for by the DNA synthesis template, which is the portion of the extension arm (i.e., excluding the primer binding site) that is “read” by the polymerase to synthesize new DNA. This polymerization effectively extends the sequence of the original 3′ hydroxyl end of the initial nick site. The DNA synthesis template encodes a single strand of DNA that comprises not only the desired edit, but also regions that are homologous to the endogenous single strand of DNA immediately downstream of the nick site on the PAM strand. Next, the encoded 3′ ended single strand of DNA (i.e., the 3′ single strand DNA flap) displaces the corresponding homologous endogenous 5′-ended single strand of DNA immediately downstream of the nick site on the PAM strand, forming a DNA intermediate having a 5′-ended single strand DNA flap, which is removed by the cell (e.g., by a flap endonuclease). The 3′-ended single strand DNA flap, which anneals to the complement of the endogenous 5′-ended single strand DNA flap, is ligated to the endogenous strand after the 5′ DNA flap is removed. The desired edit in the 3′ ended single strand DNA flap, now annealed and ligate, forms a mismatch with the complement strand, which undergoes DNA repair and/or a round of replication, thereby permanently installing the desired edit on both strands.

[0082] FIG. 2 shows three Cas complexes (SpCas9, SaCas9, and LbCas12a) that can be used in the herein described prime editors and their PAM, gRNA, and DNA cleavage features. The figure shows designs for complexes involving SpCas9, SaCas9, and LbCas12a.

[0083] FIGS. 3A-3F show designs for engineered 5′ prime editor gRNA (FIG. 3A), 3′ prime editor gRNA (FIG. 3B), and an intramolecular extension (FIG. 3C). The extended guide RNA (or extended gRNA) may also be referred to herein as PEgRNA or “prime editing guide RNA.” FIG. 3D and FIG. 3E provide additional embodiments of 3′ and 5′ prime editor gRNAs (PEgRNAs), respectively. FIG. 3F illustrates the interaction between a 3′ end prime editor guide RNA with a target DNA sequence. The embodiments of FIGS. 3A-3C depict exemplary arrangements of the reverse transcription template sequence (i.e., or more broadly referred to as a DNA synthesis template, as indicated, since the RT is only one type of polymerase that may be used in the context of prime editors), the primer binding site, and an optional linker sequence in the extended portions of the 3′, 5′, and intramolecular versions, as well as the general arrangements of the spacer and core regions. The disclosed prime editing process is not limited to these configurations of extended guide RNAs. The embodiment of FIG. 3D provides the structure of an exemplary PEgRNA contemplated herein. The PEgRNA comprises three main component elements ordered in the 5′ to 3′ direction, namely: a spacer, a gRNA core, and an extension arm at the 3′ end. The extension arm may further be divided into the following structural elements in the 5′ to 3′ direction, namely: a primer binding site (A), an edit template (B), and a homology arm (C). In addition, the PEgRNA may comprise an optional 3′ end modifier region (e1) and an optional 5′ end modifier region (e2). Still further, the PEgRNA may comprise a transcriptional termination signal at the 3′ end of the PEgRNA (not depicted). These structural elements are further defined herein. The depiction of the structure of the PEgRNA is not meant to be limiting and embraces variations in the arrangement of the elements. For example, the optional sequence modifiers (e1) and (e2) could be positioned within or between any of the other regions shown, and not limited to being located at the 3′ and 5′ ends. The PEgRNA could comprise, in certain embodiments, secondary RNA structure, such as, but not limited to, hairpins, stem/loops, toe loops, RNA-binding protein recruitment domains (e.g., the MS2 aptamer which recruits and binds to the MS2cp protein). For instance, such secondary structures could be position within the spacer, the gRNA core, or the extension arm, and in particular, within the e1 and/or e2 modifier regions. In addition to secondary RNA structures, the PEgRNAs could comprise (e.g., within the e1 and/or e2 modifier regions) a chemical linker or a poly(N) linker or tail, where “N” can be any nucleobase. In some embodiments (e.g., as shown in FIG. 72(c)), the chemical linker may function to prevent reverse transcription of the sgRNA scaffold or core. In addition, in certain embodiments (e.g., see FIG. 72(c)), the extension arm (3) could be comprised of RNA or DNA, and/or could include one or more nucleobase analogs (e.g., which might add functionality, such as temperature resilience). Still further, the orientation of the extension arm (3) can be in the natural 5′-to-3′ direction, or synthesized in the opposite orientation in the 3′-to-5′ direction (relative to the orientation of the PEgRNA molecule overall). It is also noted that one of ordinary skill in the art will be able to select an appropriate DNA polymerase, depending on the nature of the nucleic acid materials of the extension arm (i.e., DNA or RNA), for use in prime editing that may be implemented either as a fusion with the napDNAbp or as provided in trans as a separate moiety to synthesize the desired template-encoded 3′ single-strand DNA flap that includes the desired edit. For example, if the extension arm is RNA, then the DNA polymerase could be a reverse transcriptase or any other suitable RNA-dependent DNA polymerase. However, if the extension arm is DNA, then the DNA polymerase could be a DNA-dependent DNA polymerase. In various embodiments, provision of the DNA polymerase could be in trans, e.g., through the use of an RNA-protein recruitment domain (e.g., an MS2 hairpin installed on the PEgRNA (e.g., in the e1 or e2 region, or elsewhere and an MS2cp protein fused to the DNA polymerase, thereby co-localizing the DNA polymerase to the PEgRNA). It is also noted that the primer binding site does not generally form a part of the template that is used by the DNA polymerase (e.g., reverse transcriptase) to encode the resulting 3′ single-strand DNA flap that includes the desired edit. Thus, the designation of the “DNA synthesis template” refers to the region or portion of the extension arm (3) that is used as a template by the DNA polymerase to encode the desired 3′ single-strand DNA flap containing the edit and regions of homology to the 5′ endogenous single strand DNA flap that is replaced by the 3′ single strand DNA strand product of prime editing DNA synthesis. In some embodiments, the DNA synthesis template includes the “edit template” and the “homology arm”, or one or more homology arms, e.g., before and after the edit template. The edit template can be as small as a single nucleotide substitution, or it may be an insertion, or an inversion of DNA. In addition, the edit template may also include a deletion, which can be engineered by encoding homology arm that contains a desired deletion. In other embodiments, the DNA synthesis template may also include the e2 region or a portion thereof. For instance, if the e2 region comprises a secondary structure that causes termination of DNA polymerase activity, then it is possible that DNA polymerase function will be terminated before any portion of the e2 region is actual encoded into DNA. It is also possible that some or even all of the e2 region will be encoded into DNA. How much of e2 is actually used as a template will depend on its constitution and whether that constitution interrupts DNA polymerase function.

[0084] The embodiment of FIG. 3E provides the structure of another PEgRNA contemplated herein. The PEgRNA comprises three main component elements ordered in the 5′ to 3′ direction, namely: a spacer, a gRNA core, and an extension arm at the 3′ end. The extension arm may further be divided into the following structural elements in the 5′ to 3′ direction, namely: a primer binding site (A), an edit template (B), and a homology arm (C). In addition, the PEgRNA may comprise an optional 3′ end modifier region (e1) and an optional 5′ end modifier region (e2). Still further, the PEgRNA may comprise a transcriptional termination signal on the 3′ end of the PEgRNA (not depicted). These structural elements are further defined herein. The depiction of the structure of the PEgRNA is not meant to be limiting and embraces variations in the arrangement of the elements. For example, the optional sequence modifiers (e1) and (e2) could be positioned within or between any of the other regions shown, and not limited to being located at the 3′ and 5′ ends. The PEgRNA could comprise, in certain embodiments, secondary RNA structures, such as, but not limited to, hairpins, stem/loops, toe loops, RNA-binding protein recruitment domains (e.g., the MS2 aptamer which recruits and binds to the MS2cp protein). These secondary structures could be positioned anywhere in the PEgRNA molecule. For instance, such secondary structures could be position within the spacer, the gRNA core, or the extension arm, and in particular, within the e1 and/or e2 modifier regions. In addition to secondary RNA structures, the PEgRNAs could comprise (e.g., within the e1 and/or e2 modifier regions) a chemical linker or a poly(N) linker or tail, where “N” can be any nucleobase. In some embodiments (e.g., as shown in FIG. 72(c)), the chemical linker may function to prevent reverse transcription of the sgRNA scaffold or core. In addition, in certain embodiments (e.g., see FIG. 72(c)), the extension arm (3) could be comprised of RNA or DNA, and/or could include one or more nucleobase analogs (e.g., which might add functionality, such as temperature resilience). Still further, the orientation of the extension arm (3) can be in the natural 5′-to-3′ direction, or synthesized in the opposite orientation in the 3′-to-5′ direction (relative to the orientation of the PEgRNA molecule overall). It is also noted that one of ordinary skill in the art will be able to select an appropriate DNA polymerase, depending on the nature of the nucleic acid materials of the extension arm (i.e., DNA or RNA), for use in prime editing that may be implemented either as a fusion with the napDNAbp or as provided in trans as a separate moiety to synthesize the desired template-encoded 3′ single-strand DNA flap that includes the desired edit. For example, if the extension arm is RNA, then the DNA polymerase could be a reverse transcriptase or any other suitable RNA-dependent DNA polymerase. However, if the extension arm is DNA, then the DNA polymerase could be a DNA-dependent DNA polymerase. In various embodiments, provision of the DNA polymerase could be in trans, e.g., through the use of an RNA-protein recruitment domain (e.g., an MS2 hairpin installed on the PEgRNA (e.g., in the e1 or e2 region, or elsewhere and an MS2cp protein fused to the DNA polymerase, thereby co-localizing the DNA polymerase to the PEgRNA). It is also noted that the primer binding site does not generally form a part of the template that is used by the DNA polymerase (e.g., reverse transcriptase) to encode the resulting 3′ single-strand DNA flap that includes the desired edit. Thus, the designation of the “DNA synthesis template” refers to the region or portion of the extension arm (3) that is used as a template by the DNA polymerase to encode the desired 3′ single-strand DNA flap containing the edit and regions of homology to the 5′ endogenous single strand DNA flap that is replaced by the 3′ single strand DNA strand product of prime editing DNA synthesis. In some embodiments, the DNA synthesis template includes the “edit template” and the “homology arm”, or one or more homology arms, e.g., before and after the edit template. The edit template can be as small as a single nucleotide substitution, or it may be an insertion, or an inversion of DNA. In addition, the edit template may also include a deletion, which can be engineered by encoding homology arm that contains a desired deletion. In other embodiments, the DNA synthesis template may also include the e2 region or a portion thereof. For instance, if the e2 region comprises a secondary structure that causes termination of DNA polymerase activity, then it is possible that DNA polymerase function will be terminated before any portion of the e2 region is actual encoded into DNA. It is also possible that some or even all of the e2 region will be encoded into DNA. How much of e2 is actually used as a template will depend on its constitution and whether that constitution interrupts DNA polymerase function.

[0085] The schematic of FIG. 3F depicts the interaction of a typical PEgRNA with a target site of a double stranded DNA and the concomitant production of a 3′ single stranded DNA flap containing the genetic change of interest. The double strand DNA is shown with the top strand (i.e., the target strand) in the 3′ to 5′ orientation and the lower strand (i.e., the PAM strand or non-target strand) in the 5′ to 3′ direction. The top strand comprises the complement of the “protospacer” and the complement of the PAM sequence and is referred to as the “target strand” because it is the strand that is target by and anneals to the spacer of the PEgRNA. The complementary lower strand is referred to as the “non-target strand” or the “PAM strand” or the “protospacer strand” since it contains the PAM sequence (e.g., NGG) and the protospacer. Although not shown, the PEgRNA depicted would be complexed with a Cas9 or equivalent domain of a prime editor fusion protein. As shown in the schematic, the spacer of the PEgRNA anneals to the complementary region of the protospacer on the target strand. This interaction forms as DNA/RNA hybrid between the spacer RNA and the complement of the proto spacer DNA, and induces the formation of an R loop in the protospacer. As taught elsewhere herein, the Cas9 protein (not shown) then induces a nick in the non-target strand, as shown. This then leads to the formation of the 3′ ssDNA flap region immediately upstream of the nick site which, in accordance with *z*, interacts with the 3′ end of the PEgRNA at the primer binding site. The 3′ end of the ssDNA flap (i.e., the reverse transcriptase primer sequence) anneals to the primer binding site (A) on the PEgRNA, thereby priming reverse transcriptase. Next, reverse transcriptase (e.g., provided in trans or provided cis as a fusion protein, attached to the Cas9 construct) then polymerizes a single strand of DNA which is coded for by the DNA synthesis template (including the edit template (B) and homology arm (C)). The polymerization continues towards the 5′ end of the extension arm. The polymerized strand of ssDNA forms a ssDNA 3′ end flap which, as describe elsewhere (e.g., as shown in FIG. 1G), invades the endogenous DNA, displacing the corresponding endogenous strand (which is removed as a 5′ ended DNA flap of endogenous DNA), and installing the desired nucleotide edit (single nucleotide base pair change, deletions, insertions (including whole genes) through naturally occurring DNA repair/replication rounds.

[0086] FIG. 3G depicts yet another embodiment of prime editing contemplated herein. In particular, the top schematic depicts one embodiment of a prime editor (PE), which comprises a fusion protein of a napDNAbp (e.g., SpCas9) and a polymerase (e.g., a reverse transcriptase), which are joined by a linker. The PE forms a complex with a PEgRNA by binding to the gRNA core of the PEgRNA. In the embodiment shown, the PEgRNA is equipped with a 3′ extension arm that comprises, beginning at the 3′ end, a primer binding site (PBS) followed by a DNA synthesis template. The bottom schematic depicts a variant of a prime editor, referred to as a “trans prime editor (tPE).” In this embodiment, the DNA synthesis template and PBS are decoupled from the PEgRNA and presented on a separate molecule, referred to as a trans prime editor RNA template (“tPERT”), which comprises an RNA-protein recruitment domain (e.g., a MS2 hairpin). The PE itself is further modified to comprise a fusion to a rPERT recruiting protein (“RP”), which is a protein which specifically recognizes and binds to the RNA-protein recruitment domain. In the example where the RNA-protein recruitment domain is an MS2 hairpin, the corresponding rPERT recruiting protein can be MS2cp of the MS2 tagging system. The MS2 tagging system is based on the natural interaction of the MS2 bacteriophage coat protein (“MCP” or “MS2cp”) with a stem-loop or hairpin structure present in the genome of the phage, i.e., the “MS2 hairpin” or “MS2 aptamer.” In the case of trans prime editing, the RP-PE:gRNA complex “recruits” a tPERT having the appropriate RNA-protein recruitment domain to co-localize with the PE:gRNA complex, thereby providing the PBS and DNA synthesis template in trans for use in prime editing, as shown in the example depicted in FIG. 3H.

[0087] FIG. 3H depicts the process of trans prime editing. In this embodiment, the trans prime editor comprises a “PE2” prime editor (i.e., a fusion of a Cas9(H840A) and a variant MMLV RT) fused to an MS2cp protein (i.e., a type of recruiting protein that recognizes and binds to an MS2 aptamer) and which is complexed with an sgRNA (i.e., a standard guide RNA as opposed to a PEgRNA). The trans prime editor binds to the target DNA and nicks the nontarget strand. The MS2cp protein recruits a tPERT in trans through the specific interaction with the RNA-protein recruitment domain on the tPERT molecule. The tPERT becomes co-localized with the trans prime editor, thereby providing the PBS and DNA synthesis template functions in trans for use by the reverse transcriptase polymerase to synthesize a single strand DNA flap having a 3′ end and containing the desired genetic information encoded by the DNA synthesis template.

[0088] FIGS. 4A-4E demonstrate in vitro TPRT assays (i.e., prime editing assays). FIG. 4A is a schematic of fluorescently labeled DNA substrates gRNA templated extension by an RT enzyme, PAGE. FIG. 4B shows TPRT (i.e., prime editing) with pre-nicked substrates, dCas9, and 5′-extended gRNAs of differing synthesis template length. FIG. 4C shows the RT reaction with pre-nicked DNA substrates in the absence of Cas9. FIG. 4D shows TPRT (i.e., prime editing) on full dsDNA substrates with Cas9(H840A) and 5′-extended gRNAs. FIG. 4E shows a 3′-extended gRNA template with pre-nicked and full dsDNA substrates. All reactions are with M-MLV RT.

[0089] FIG. 5 shows in vitro validations using 5′-extended gRNAs with varying length synthesis templates. Fluorescently labeled (Cy5) DNA targets were used as substrates, and were pre-nicked in this set of experiments. The Cas9 used in these experiments is catalytically dead Cas9 (dCas9), and the RT used is Superscript III, a commercial RT derived from the Moloney-Murine Leukemia Virus (M-MLV). dCas9:gRNA complexes were formed from purified components. Then, the fluorescently labeled DNA substrate was added along with dNTPs and the RT enzyme. After 1 hour of incubation at 37° C., the reaction products were analyzed by denaturing urea-polyacrylamide gel electrophoresis (PAGE). The gel image shows extension of the original DNA strand to lengths that are consistent with the length of the reverse transcription template.

[0090] FIG. 6 shows in vitro validations using 5′-extended gRNAs with varying length synthesis templates, which closely parallels those shown in FIG. 5. However, the DNA substrates are not pre-nicked in this set of experiments. The Cas9 used in these experiments is a Cas9 nickase (SpyCas9 H840A mutant) and the RT used is Superscript III, a commercial RT derived from the Moloney-Murine Leukemia Virus (M-MLV). The reaction products were analyzed by denaturing urea-polyacrylamide gel electrophoresis (PAGE). As shown in the gel, the nickase efficiently cleaves the DNA strand when the standard gRNA is used (gRNA_0, lane 3).

[0091] FIG. 7 demonstrates that 3′ extensions support DNA synthesis and do not significantly effect Cas9 nickase activity. Pre-nicked substrates (black arrow) are near-quantitatively converted to RT products when either dCas9 or Cas9 nickase is used (lanes 4 and 5). Greater than 50% conversion to the RT product (white arrow) is observed with full substrates (lane 3). Cas9 nickase (SpyCas9 H840A mutant), catalytically dead Cas9 (dCas9) and Superscript III, a commercial RT derived from the Moloney-Murine Leukemia Virus (M-MLV) are used.

[0092] FIG. 8 demonstrates dual color experiments that were used to determine if the RT reaction preferentially occurs with the gRNA in cis (bound in the same complex). Two separate experiments were conducted for 5′-extended and 3′-extended gRNAs. Products were analyzed by PAGE. Product ratio calculated as (Cy3cis/Cy3trans)/(Cy5trans/Cy5cis).

[0093] FIGS. 9A-9D demonstrates a flap model substrate. FIG. 9A shows a dual-FP reporter for flap-directed mutagenesis. FIG. 9B shows stop codon repair in HEK cells. FIG. 9C shows sequenced yeast clones after flap repair. FIG. 9D shows testing of different flap features in human cells.

[0094] FIG. 10 demonstrates prime editing on plasmid substrates. A dual-fluorescent reporter plasmid was constructed for yeast (S. cerevisiae) expression. Expression of this construct in yeast produces only GFP. The in vitro prime editing reaction introduces a point mutation, and transforms the parent plasmid or an in vitro Cas9(H840A) nicked plasmid into yeast. The colonies are visualized by fluorescence imaging. Yeast dual-FP plasmid transformants are shown. Transforming the parent plasmid or an in vitro Cas9(H840A) nicked plasmid results in only green GFP expressing colonies. The prime editing reaction with 5′-extended or 3′-extended gRNAs produces a mix of green and yellow colonies. The latter express both GFP and mCherry. More yellow colonies are observed with the 3′-extended gRNA. A positive control that contains no stop codon is shown as well.

[0095] FIG. 11 shows prime editing on plasmid substrates similar to the experiment in FIG. 10, but instead of installing a point mutation in the stop codon, prime editing installs a single nucleotide insertion (left) or deletion (right) that repairs a frameshift mutation and allows for synthesis of downstream mCherry. Both experiments used 3′ extended gRNAs.

[0096] FIG. 12 shows editing products of prime editing on plasmid substrates, characterized by Sanger sequencing. Individually colonies from the TRT transformations were selected and analyzed by Sanger sequencing. Precise edits were observed by sequencing select colonies. Green colonies contained plasmids with the original DNA sequence, while yellow colonies contained the precise mutation designed by the prime editing gRNA. No other point mutations or indels were observed.

[0097] FIG. 13 shows the potential scope for the new prime editing technology is shown and compared to deaminase-mediated base editor technologies.

[0098] FIG. 14 shows a schematic of editing in human cells.

[0099] FIG. 15 demonstrates the extension of the primer binding site in gRNA.

[0100] FIG. 16 shows truncated gRNAs for adjacent targeting.

[0101] FIGS. 17A-17C are graphs displaying the % T to A conversion at the target nucleotide after transfection of components in human embryonic kidney (HEK) cells. FIG. 17A shows data, which presents results using an N-terminal fusion of wild type MLV reverse transcriptase to Cas9(H840A) nickase (32-amino acid linker). FIG. 17B is similar to FIG. 17A, but for C-terminal fusion of the RT enzyme. FIG. 17C is similar to FIG. 17A but the linker between the MLV RT and Cas9 is 60 amino acids long instead of 32 amino acids.

[0102] FIG. 18 shows high purity T to A editing at HEK3 site by high-throughput amplicon sequencing. The output of sequencing analysis displays the most abundant genotypes of edited cells.

[0103] FIG. 19 shows editing efficiency at the target nucleotide (striped bars) alongside indel rates (white bars). WT refers to the wild type MLV RT enzyme. The mutant enzymes (M1 through M4) contain the mutations listed to the right. Editing rates were quantified by high throughput sequencing of genomic DNA amplicons.

[0104] FIG. 20 shows editing efficiency of the target nucleotide when a single strand nick is introduced in the complementary DNA strand in proximity to the target nucleotide. Nicking at various distances from the target nucleotide was tested (triangles). Editing efficiency at the target base pair (striped bars) is shown alongside the indel formation rate (white bars). The “none” example does not contain a complementary strand nicking guide RNA. Editing rates were quantified by high throughput sequencing of genomic DNA amplicons.

[0105] FIG. 21 demonstrates processed high throughput sequencing data showing the desired T to A transversion mutation and general absence of other major genome editing byproducts.

[0106] FIG. 22 provides a schematic of an exemplary process for conducting targeted mutagenesis with an error-prone reverse transcriptase on a target locus using a nucleic acid programmable DNA binding protein (napDNAbp) complexed with an extended guide RNA, i.e., prime editing with an error-prone RT. This process may be referred to as an embodiment of prime editing for targeted mutagenesis. The extended guide RNA comprises an extension at the 3′ or 5′ end of the guide RNA, or at an intramolecular location in the guide RNA. In step (a), the napDNAbp/gRNA complex contacts the DNA molecule and the gRNA guides the napDNAbp to bind to the target locus to be mutagenized. In step (b), a nick in one of the strands of DNA of the target locus is introduced (e.g., by a nuclease or chemical agent), thereby creating an available 3′ end in one of the strands of the target locus. In certain embodiments, the nick is created in the strand of DNA that corresponds to the R-loop strand, i.e., the strand that is not hybridized to the guide RNA sequence. In step (c), the 3′ end DNA strand interacts with the extended portion of the guide RNA in order to prime reverse transcription. In certain embodiments, the 3′ ended DNA strand hybridizes to a specific RT priming sequence on the extended portion of the guide RNA. In step (d), an error-prone reverse transcriptase is introduced which synthesizes a mutagenized single strand of DNA from the 3′ end of the primed site towards the 3′ end of the guide RNA. Exemplary mutations are indicated with an asterisk “*”. This forms a single-strand DNA flap comprising the desired mutagenized region. In step (e), the napDNAbp and guide RNA are released. Steps (f) and (g) relate to the resolution of the single strand DNA flap (comprising the mutagenized region) such that the desired mutagenized region becomes incorporated into the target locus. This process can be driven towards the desired product formation by removing the corresponding 5′ endogenous DNA flap that forms once the 3′ single strand DNA flap invades and hybridizes to the complementary sequence on the other strand. The process can also be driven towards product formation with second strand nicking, as exemplified in FIG. 1F. Following endogenous DNA repair and/or replication processes, the mutagenized region becomes incorporated into both strands of DNA of the DNA locus.

[0107] FIG. 23 is a schematic of gRNA design for contracting trinucleotide repeat sequences and trinucleotide repeat contraction with TPRT genome editing (i.e., prime editing). Trinucleotide repeat expansion is associated with a number of human diseases, including Huntington's disease, Fragile X syndrome, and Friedreich's ataxia. The most common trinucleotide repeat contains CAG triplets, though GAA triplets (Friedreich's ataxia) and CGG triplets (Fragile X syndrome) also occur. Inheriting a predisposition to expansion, or acquiring an already expanded parental allele, increases the likelihood of acquiring the disease. Pathogenic expansions of trinucleotide repeats could hypothetically be corrected using prime editing. A region upstream of the repeat region can be nicked by an RNA-guided nuclease, then used to prime synthesis of a new DNA strand that contains a healthy number of repeats (which depends on the particular gene and disease). After the repeat sequence, a short stretch of homology is added that matches the identity of the sequence adjacent to the other end of the repeat (bold strand). Invasion of the newly synthesized strand, and subsequent replacement of the endogenous DNA with the newly synthesized flap, leads to a contracted repeat allele.

[0108] FIG. 24 is a schematic showing precise 10-nucleotide deletion with prime editing. A guide RNA targeting the HEK3 locus was designed with a reverse transcription template that encodes a 10-nucleotide deletion after the nick site. Editing efficiency in transfected HEK cells was assessed using amplicon sequencing.

[0109] FIG. 25 is a schematic showing gRNA design for peptide tagging genes at endogenous genomic loci and peptide tagging with TPRT genome editing (i.e., prime editing). The FlAsH and ReAsH tagging systems comprise two parts: (1) a fluorophore-biarsenical probe, and (2) a genetically encoded peptide containing a tetracysteine motif, exemplified by the sequence FLNCCPGCCMEP (SEQ ID NO: 1). When expressed within cells, proteins containing the tetracysteine motif can be fluorescently labeled with fluorophore-arsenic probes (see ref: J. Am. Chem. Soc., 2002, 124 (21), pp 6063-6076. DOI: 10.1021/ja017687n). The “sortagging” system employs bacterial sortase enzymes that covalently conjugate labeled peptide probes to proteins containing suitable peptide substrates (see ref: Nat. Chem. Biol. 2007 Nov. 3(11):707-8. DOI: 10.1038/nchembio.2007.31). The FLAG-tag (DYKDDDDK (SEQ ID NO: 2)), V5-tag (GKPIPNPLLGLDST (SEQ ID NO: 3)), GCN4-tag (EELLSKNYHLENEVARLKK (SEQ ID NO: 4)), HA-tag (YPYDVPDYA (SEQ ID NO: 5)), and Myc-tag (EQKLISEEDL (SEQ ID NO: 6)) are commonly employed as epitope tags for immunoassays. The pi-clamp encodes a peptide sequence (FCPF (SEQ ID NO: 622)) that can by labeled with a pentafluoro-aromatic substrates (ref: Nat. Chem. 2016 Feb. 8(2):120-8. doi: 10.1038/nchem.2413).

[0110] FIG. 26A shows precise installation of a His6-tag and a FLAG-tag into genomic DNA. A guide RNA targeting the HEK3 locus was designed with a reverse transcription template that encodes either an 18-nt His-tag insertion or a 24-nt FLAG-tag insertion. Editing efficiency in transfected HEK cells was assessed using amplicon sequencing. Note that the full 24-nt sequence of the FLAG-tag is outside of the viewing frame (sequencing confirmed full and precise insertion). FIG. 26B shows a schematic outlining various applications involving protein/peptide tagging, including (a) rendering proteins soluble or insoluble, (b) changing or tracking the cellular localization of a protein, (c) extending the half-life of a protein, (d) facilitating protein purification, and (e) facilitating the detection of proteins.

[0111] FIG. 27 shows an overview of prime editing by installing a protective mutation in PRNP that prevents or halts the progression of prion disease. The PEgRNA sequences correspond to SEQ ID NO: 4082 on the left (i.e., 5′ of the sgRNA scaffold) and SEQ ID NO 4083 on the right (i.e., 3′ of the sgRNA scaffold).

[0112] FIG. 28A is a schematic of PE-based insertion of sequences encoding RNA motifs.

[0113] FIG. 28B is a list (not exhaustive) of some example motifs that could potentially be inserted, and their functions.

[0114] FIG. 29A is a depiction of a prime editor. FIG. 29B shows possible modifications to genomic, plasmid, or viral DNA directed by a PE. FIG. 29C shows an example scheme for insertion of a library of peptide loops into a specified protein (in this case GFP) via a library of PEgRNAs. FIG. 29D shows an example of possible programmable deletions of codons or N-, or C-terminal truncations of a protein using different PEgRNAs. Deletions would be predicted to occur with minimal generation of frameshift mutations.

[0115] FIG. 30 shows a possible scheme for iterative insertion of codons in a continual evolution system, such as PACE.

[0116] FIG. 31 is an illustration of an engineered gRNA showing the gRNA core, ˜20 nt spacer matching the sequence of the targeted gene, the reverse transcription template with immunogenic epitope nucleotide sequence and the primer binding site matching the sequence of the targeted gene.

[0117] FIG. 32 is a schematic showing using prime editing as a means to insert known immunogenicity epitopes into endogenous or foreign genomic DNA, resulting in modification of the corresponding proteins.

[0118] FIG. 33 is a schematic showing PEgRNA design for primer binding sequence insertions and primer binding insertion into genomic DNA using prime editing for determining off-target editing. In this embodiment, prime editing is conducted inside a living cell, a tissue, or an animal model. As a first step, an appropriate PEgRNA is designed. The top schematic shows an exemplary PEgRNA that may be used in this aspect. The spacer in the PEgRNA (labeled “protospacer”) is complementary to one of the strands of the genomic target. The PE:PEgRNA complex (i.e., the PE complex) installs a single stranded 3′ end flap at the nick site which contains the encoded primer binding sequence and the region of homology (coded by the homology arm of the PEgRNA) that is complementary to the region just downstream of the cut site (in bold). Through flap invasion and DNA repair/replication processes, the synthesized strand becomes incorporated into the DNA, thereby installing the primer binding site. This process can occur at the desired genomic target, but also at other genomic sites that might interact with the PEgRNA in an off-target manner (i.e., the PEgRNA guides the PE complex to other off-target sites due to the complementarity of the spacer region to other genomic sites that are not the intended genomic site). Thus, the primer binding sequence may be installed not only at the desired genomic target, but at off-target genomic sites elsewhere in the genome. In order to detect the insertion of these primer binding sites at both the intended genomic target sites and the off-target genomic sites, the genomic DNA (post-PE) can be isolated, fragmented, and ligated to adapter nucleotides (shown in red). Next, PCR may be carried out with PCR oligonucleotides that anneal to the adapters and to the inserted primer binding sequence to amplify on-target and off-target genomic DNA regions into which the primer binding site was inserted by PE. High throughput sequencing then me be conducted to and sequence alignments to identify the insertion points of PE-inserted primer binding sequences at either the on-target site or at off-target sites.

[0119] FIG. 34 is a schematic showing the precise insertion of a gene with PE.

[0120] FIG. 35A is a schematic showing the natural insulin signaling pathway. FIG. 35B is a schematic showing FKBP12-tagged insulin receptor activation controlled by FK1012.

[0121] FIG. 36 shows small-molecule monomers. References: humped FK506 mimic (2)¹⁰⁷

[0122] FIGS. 37A-37B show small-molecule dimers. References: FK10124^{95,96}; FK1012 5¹⁰⁸; FK10126¹⁰⁷; AP1903 7¹⁰⁷; cyclosporin A dimer 8⁹⁸; FK506—cyclosporin A dimer (FkCsA) 9¹⁰⁰.

[0123] FIGS. 38A-38F provide an overview of prime editing and feasibility studies in vitro and in yeast cells. FIG. 38A shows the 75,122 known pathogenic human genetic variants in ClinVar (accessed July, 2019), classified by type. FIG. 38B shows that a prime editing complex consists of a prime editor (PE) protein containing an RNA-guided DNA-nicking domain, such as Cas9 nickase, fused to an engineered reverse transcriptase domain and complexed with a prime editing guide RNA (PEgRNA). The PE:PEgRNA complex binds the target DNA site and enables a large variety of precise DNA edits at a wide range of DNA positions before or after the target site's protospacer adjacent motif (PAM). FIG. 38C shows that upon DNA target binding, the PE:PEgRNA complex nicks the PAM-containing DNA strand. The resulting free 3′ end hybridizes to the primer-binding site of the PEgRNA. The reverse transcriptase domain catalyzes primer extension using the RT template of the PEgRNA, resulting in a newly synthesized DNA strand containing the desired edit (the 3′ flap).Equilibration between the edited 3′ flap and the unedited 5′ flap containing the original DNA, followed by cellular 5′ flap cleavage and ligation, and DNA repair or replication to resolve the heteroduplex DNA, results in stably edited DNA. FIG. 38D shows in vitro 5′-extended PEgRNA primer extension assays with pre-nicked dsDNA substrates containing 5′-Cy5 labeled PAM strands, dCas9, and a commercial M-MLV RT variant (RT, Superscript III). dCas9 was complexed with PEgRNAs containing RT template of varying lengths, then added to DNA substrates along with the indicated components. Reactions were incubated at 37° C. for 1 hour, then analyzed by denaturing urea PAGE and visualized for Cy5 fluorescence. FIG. 38E shows primer extension assays performed as in FIG. 38D using 3′-extended PEgRNAs pre-complexed with dCas9 or Cas9 H840A nickase, and pre-nicked or non-nicked 5′-Cy5-labeled dsDNA substrates. FIG. 38F shows yeast colonies transformed with GFP-mCherry fusion reporter plasmids edited in vitro with PEgRNAs, Cas9 nickase, and RT. Plasmids containing nonsense or frameshift mutations between GFP and mCherry were edited with 5′-extended or 3′-extended PEgRNAs that restore mCherry translation via transversion mutation, 1-bp insertion, or 1-bp deletion. GFP and mCherry double-positive cells (yellow) reflect successful editing.

[0124] FIGS. 39A-39D show prime editing of genomic DNA in human cells by PE1 and PE2. FIG. 39A shows PEgRNAs contain a spacer sequence, a sgRNA scaffold, and a 3′ extension containing a primer-binding site and a reverse transcription (RT) template, which contains the edited base(s). The primer-binding site hybridizes to the PAM-containing DNA strand immediately upstream of the site of nicking. The RT template is homologous to the DNA sequence downstream of the nick, with the exception of the encoded edit. FIG. 39B shows an installation of a T●A-to-A●T transversion edit at the HEK3 site in HEK293T cells using Cas9 H840A nickase fused to wild-type M-MLV reverse transcriptase (PE1) and PEgRNAs of varying primer-binding site lengths. FIG. 39C shows the use of an engineered pentamutant M-MLV reverse transcriptase (D200N, L603W, T306K, W313F, T330P) in PE2 substantially improves prime editing transversion efficiencies at five genomic sites in HEK293T cells, and small insertion and small deletion edits at HEK3. FIG. 39D is a comparison of PE2 editing efficiencies with varying RT template lengths at five genomic sites in HEK293T cells. Values and error bars reflect the mean and s.d. of three independent biological replicates.

[0125] FIGS. 40A-40C show PE3 and PE3b systems nick the non-edited strand to increase prime editing efficiency. FIG. 40A is an overview of the prime editing by PE3. After initial synthesis of the edited strand, DNA repair will remove either the newly synthesized strand containing the edit (3′ flap excision) or the original genomic DNA strand (5′ flap excision). 5′ flap excision leaves behind a DNA heteroduplex containing one edited strand and one non-edited strand. Mismatch repair machinery or DNA replication could resolve the heteroduplex to give either edited or non-edited products. Nicking the non-edited strand favors repair of that strand, resulting in preferential generation of stable duplex DNA containing the desired edit. FIG. 40B shows the effect of complementary strand nicking on PE3-mediated prime editing efficiency and indel formation. “None” refers to PE2 controls, which do not nick the complementary strand. FIG. 40C is a comparison of editing efficiencies with PE2 (no complementary strand nick), PE3 (general complementary strand nick), and PE3b (edit-specific complementary strand nick). All editing yields reflect the percentage of total sequencing reads that contain the intended edit and do not contain indels among all treated cells, with no sorting. Values and error bars reflect the mean and s.d. of three independent biological replicates.

[0126] FIGS. 41A-41K show targeted insertions, deletions, and all 12 types of point mutations with PE3 at seven endogenous human genomic loci in HEK293T cells. FIG. 41A is a graph showing all 12 types of single-nucleotide transition and transversion edits from position +1 to +8 (counting the location of the PEgRNA-induced nick as between position +1 and −1) of the HEK3 site using a 10-nt RT template. FIG. 41B is a graph showing long-range PE3 transversion edits at the HEK3 site using a 34-nt RT template. FIGS. 41C-41H are graphs showing all 12 types of transition and transversion edits at various positions in the prime editing window for (FIG. 41C) RNF2, (FIG. 41D) FANCF, (FIG. 41E) EMX1, (FIG. 41F) RUNX1, (FIG. 41G) VEGFA, and (FIG. 41H) DNMT1. FIG. 41I is a graph showing targeted 1- and 3-bp insertions, and 1- and 3-bp deletions with PE3 at seven endogenous genomic loci. FIG. 41J is a graph showing the targeted precise deletions of 5 to 80 bp at the HEK3 target site. FIG. 41K is a graph showing a combination edits of insertions and deletions, insertions and point mutations, deletions and point mutations, and double point mutations at three endogenous genomic loci. All editing yields reflect the percentage of total sequencing reads that contain the intended edit and do not contain indels among all treated cells, with no sorting. Values and error bars reflect the mean and s.d. of three independent biological replicates.

[0127] FIGS. 42A-42H show the comparison of prime editing and base editing, and off-target editing by Cas9 and PE3 at known Cas9 off-target sites. FIG. 42A shows total CG-to-TA editing efficiency at the same target nucleotides for PE2, PE3, BE2max, and BE4max at endogenous HEK3, FANCF, and EMX1 sites in HEK293T cells. FIG. 42B shows indel frequency from treatments in FIG. 42A. FIG. 42C shows the editing efficiency of precise CG-to-T●A edits (without bystander edits or indels) for PE2, PE3, BE2max, and BE4max at HEK3, FANCF, and EMX1. For EMX1, precise PE combination edits of all possible combinations of CG-to-T●A conversion at the three targeted nucleotides are also shown.

[0128] FIG. 42D shows the total A●T-to-GC editing efficiency for PE2, PE3, ABEdmax, and ABEmax at HEK3 and FANCF. FIG. 42E shows the precise A●T-to-GC editing efficiency without bystander edits or indels for at HEK3 and FANCF. FIG. 42F shows indel frequency from treatments in FIG. 42D. FIG. 42G shows the average triplicate editing efficiencies (percentage sequencing reads with indels) in HEK293T cells for Cas9 nuclease at four on-target and 16 known off-target sites. The 16 off-target sites examined were the top four previously reported off-target sites^{118,159} for each of the four on-target sites. For each on-target site, Cas9 was paired with a sgRNA or with each of four PEgRNAs that recognize the same protospacer. FIG. 42H shows the average triplicate on-target and off-target editing efficiencies and indel efficiencies (below in parentheses) in HEK293T cells for PE2 or PE3 paired with each PEgRNA in (FIG. 42G). On-target editing yields reflect the percentage of total sequencing reads that contain the intended edit and do not contain indels among all treated cells, with no sorting. Off-target editing yields reflect off-target locus modification consistent with prime editing. Values and error bars reflect the mean and s.d. of three independent biological replicates.

[0129] FIGS. 43A-43I show prime editing in various human cell lines and primary mouse cortical neurons, installation and correction of pathogenic transversion, insertion, or deletion mutations, and comparison of prime editing and HDR. FIG. 43A is a graph showing the installation (via T●A-to-A●T transversion) and correction (via A●T-to-T●A transversion) of the pathogenic E6V mutation in HBB in HEK293T cells. Correction either to wild-type HBB, or to HBB containing a silent mutation that disrupts the PEgRNA PAM, is shown. FIG. 43B is a graph showing the installation (via 4-bp insertion) and correction (via 4-bp deletion) of the pathogenic HEXA 1278+TATC allele in HEK293T cells. Correction either to wild-type HEXA, or to HEXA containing a silent mutation that disrupts the PEgRNA PAM, is shown.

[0130] FIG. 43C is a graph showing the installation of the protective G127V variant in PRNP in HEK293T cells via G●C-to-T●A transversion. FIG. 43D is a graph showing prime editing in other human cell lines including K562 (leukemic bone marrow cells), U2OS (osteosarcoma cells), and HeLa (cervical cancer cells). FIG. 43E is a graph showing the installation of a G●C-to-T●A transversion mutation in DNMT1 of mouse primary cortical neurons using a dual split-intein PE3 lentivirus system, in which the N-terminal half is Cas9 (1-573) fused to N-intein and through a P2A self-cleaving peptide to GFP—KASH, and the C-terminal half is the C-intein fused to the remainder of PE2. PE2 halves are expressed from a human synapsin promoter that is highly specific for mature neurons. Sorted values reflect editing or indels from GFP-positive nuclei, while unsorted values are from all nuclei. FIG. 43F is a comparison of PE3 and Cas9-mediated HDR editing efficiencies at endogenous genomic loci in HEK293T cells. FIG. 43G is a comparison of PE3 and Cas9-mediated HDR editing efficiencies at endogenous genomic loci in K562, U2OS, and HeLa cells. FIG. 43H is a comparison of PE3 and Cas9-mediated HDR indel byproduct generation in HEK293T, K562, U2OS, and HeLa cells. FIG. 43I shows targeted insertion of a His6 tag (18 bp), FLAG epitope tag (24 bp), or extended LoxP site (44 bp) in HEK293T cells by PE3. All editing yields reflect the percentage of total sequencing reads that contain the intended edit and do not contain indels among all treated cells. Values and error bars reflect the mean and s.d. of three independent biological replicates.

[0131] FIGS. 44A-44G show in vitro prime editing validation studies with fluorescently labeled DNA substrates. FIG. 44A shows electrophoretic mobility shift assays with dCas9, 5′-extended PEgRNAs and 5′-Cy5-labeled DNA substrates. PEgRNAs 1 through 5 contain a 15-nt linker sequence (linker A for PEgRNA 1, linker B for PEgRNAs 2 through 5) between the spacer and the PBS, a 5-nt PBS sequence, and RT templates of 7 nt (PEgRNAs 1 and 2), 8 nt (PEgRNA 3), 15 nt (PEgRNA 4), and 22 nt (PEgRNA 5). PEgRNAs are those used in FIGS. 44E and 44F; full sequences are listed in Tables 2A-2C. FIG. 44B shows in vitro nicking assays of Cas9 H840A using 5′-extended and 3′-extended PEgRNAs. FIG. 44C shows Cas9-mediated indel formation in HEK293T cells at HEK3 using 5′-extended and 3′-extended PEgRNAs. FIG. 44D shows an overview of prime editing in vitro biochemical assays. 5′-Cy5-labeled pre-nicked and non-nicked dsDNA substrates were tested. sgRNAs, 5′-extended PEgRNAs, or 3′-extended PEgRNAs were pre-complexed with dCas9 or Cas9 H840A nickase, then combined with dsDNA substrate, M-MLV RT, and dNTPs. Reactions were allowed to proceed at 37° C. for 1 hour prior to separation by denaturing urea PAGE and visualization by Cy5 fluorescence. FIG. 44E shows primer extension reactions using 5′-extended PEgRNAs, pre-nicked DNA substrates, and dCas9 lead to significant conversion to RT products. FIG. 44F shows primer extension reactions using 5′-extended PEgRNAs as in FIG. 44B, with non-nicked DNA substrate and Cas9 H840A nickase. Product yields are greatly reduced by comparison to pre-nicked substrate. FIG. 44G shows an in vitro primer extension reaction using a 3′-PEgRNA generates a single apparent product by denaturing urea PAGE. The RT product band was excised, eluted from the gel, then subjected to homopolymer tailing with terminal transferase (TdT) using either dGTP or dATP. Tailed products were extended by poly-T or poly-C primers, and the resulting DNA was sequenced. Sanger traces indicate that three nucleotides derived from the gRNA scaffold were reverse transcribed (added as the final 3′ nucleotides to the DNA product). Note that in mammalian cell prime editing experiments, PEgRNA scaffold insertion is much rarer than in vitro (FIGS. 56A-56D), potentially due to the inability of the tethered reverse transcriptase to access the Cas9-bound guide RNA scaffold, and/or cellular excision of mismatched 3′ ends of 3′ flaps containing PEgRNA scaffold sequences.

[0132] FIGS. 45A-45G show cellular repair in yeast of 3′ DNA flaps from in vitro prime editing reactions. FIG. 45A shows that dual fluorescent protein reporter plasmids contain GFP and mCherry open reading frames separated by a target site encoding an in-frame stop codon, a +1 frameshift, or a −1 frameshift. Prime editing reactions were carried out in vitro with Cas9 H840A nickase, PEgRNA, dNTPs, and M-MLV reverse transcriptase, and then transformed into yeast. Colonies that contain unedited plasmids produce GFP but not mCherry. Yeast colonies containing edited plasmids produce both GFP and mCherry as a fusion protein. FIG. 45B shows an overlay of GFP and mCherry fluorescence for yeast colonies transformed with reporter plasmids containing a stop codon between GFP and mCherry (unedited negative control, top), or containing no stop codon or frameshift between GFP and mCherry (pre-edited positive control, bottom). FIGS. 45C-45F show a visualization of mCherry and GFP fluorescence from yeast colonies transformed with in vitro prime editing reaction products. FIG. 45C shows a stop codon correction via T●A-to-A●T transversion using a 3′-extended PEgRNA, or a 5′-extended PEgRNA, as shown in FIG. 45D. FIG. 45E shows a +1 frameshift correction via a 1-bp deletion using a 3′-extended PEgRNA. FIG. 45F shows a −1 frameshift correction via a 1-bp insertion using a 3′-extended PEgRNA. FIG. 45G shows Sanger DNA sequencing traces from plasmids isolated from GFP-only colonies in FIG. 45B and GFP and mCherry double-positive colonies in FIG. 45C.

[0133] FIGS. 46A-46F show correct editing versus indel generation with PE1. FIG. 46A shows T●A-to-A●T transversion editing efficiency and indel generation by PE1 at the +1 position of HEK3 using PEgRNAs containing 10-nt RT templates and a PBS sequences ranging from 8-17 nt. FIG. 46B shows G●C-to-T●A transversion editing efficiency and indel generation by PE1 at the +5 position of EMX1 using PEgRNAs containing 13-nt RT templates and a PBS sequences ranging from 9-17 nt. FIG. 46C shows G●C-to-T●A transversion editing efficiency and indel generation by PE1 at the +5 position of FANCF using PEgRNAs containing 17-nt RT templates and a PBS sequences ranging from 8-17 nt.

[0134] FIG. 46D shows C●G-to-A●T transversion editing efficiency and indel generation by PE1 at the +1 position of RNF2 using PEgRNAs containing 11-nt RT templates and a PBS sequences ranging from 9-17 nt. FIG. 46E shows G●C-to-T●A transversion editing efficiency and indel generation by PE1 at the +2 position of HEK4 using PEgRNAs containing 13-nt RT templates and a PBS sequences ranging from 7-15 nt. FIG. 46F shows PE1-mediated+1 T deletion, +1 A insertion, and +1 CTT insertion at the HEK3 site using a 13-nt PBS and 10-nt RT template. Sequences of PEgRNAs are those used in FIG. 39C (see Tables 3A-3R). Values and error bars reflect the mean and s.d. of three independent biological replicates.

[0135] FIGS. 47A-47S show the evaluation of M-MLV RT variants for prime editing. FIG. 47A shows the abbreviations for prime editor variants used in this figure. FIG. 47B shows targeted insertion and deletion edits with PE1 at the HEK3 locus. FIGS. 47C-47H show a comparison of 18 prime editor constructs containing M-MLV RT variants for their ability to install a +2 G●C-to-C●G transversion edit at HEK3 as shown in FIG. 47C, a 24-bp FLAG insertion at HEK3 as shown in FIG. 47D, a +1 CG-to-A●T transversion edit at RNF2 as shown in FIG. 47E, a +1 GC-to-CG transversion edit at EMX1 as shown in FIG. 47F, a +2 T●A-to-A●T transversion edit at HBB as shown in FIG. 47G, and a +1 G●C-to-C●G transversion edit at FANCF as shown in FIG. 47H. FIGS. 47I-47N show a comparison of four prime editor constructs containing M-MLV variants for their ability to install the edits shown in FIGS. 47C-47H in a second round of independent experiments. FIGS. 47O-47S show PE2 editing efficiency at five genomic loci with varying PBS lengths. FIG. 47O shows a +1 T●A-to-A●T variation at HEK3. FIG. 47P shows a +5 G●C-to-T●A variation at EMX1.

[0136] FIG. 47Q shows a +5 G●C-to-T●A variation at FANCF. FIG. 47R shows a +1 C●G-to-A●T variation at RNF2. FIG. 47S shows a +2 G●C-to-T●A variation at HEK4. Values and error bars reflect the mean and s.d. of three independent biological replicates.

[0137] FIGS. 48A-48C show design features of PEgRNA PBS and RT template sequences.

[0138] FIG. 48A shows PE2-mediated+5 G●C-to-T●A transversion editing efficiency (solid line) at VEGFA in HEK293T cells as a function of RT template length. Indels (dotted line) are plotted for comparison. The sequence below the graph shows the last nucleotide templated for synthesis by the PEgRNA. G nucleotides (templated by a C in the PEgRNA) are highlighted; RT templates that end in C should be avoided during PEgRNA design to maximize prime editing efficiencies. FIG. 48B shows +5 G●C-to-T●A transversion editing and indels for DNMT1 as in FIG. 48A. FIG. 48C shows +5 G●C-to-T●A transversion editing and indels for RUNX1 as in FIG. 48A. Values and error bars reflect the mean and s.d. of three independent biological replicates.

[0139] FIGS. 49A-49B show the effects of PE2, PE2 R110S K103L, Cas9 H840A nickase, and dCas9 on cell viability. HEK293T cells were transfected with plasmids encoding PE2, PE2 R110S K103L, Cas9 H840A nickase, or dCas9, together with a HEK3-targeting PEgRNA plasmid. Cell viability was measured every 24 hours post-transfection for 3 days using the CellTiter-Glo 2.0 assay (Promega). FIG. 49A shows viability, as measured by luminescence, at 1, 2, or 3 days post-transfection. Values and error bars reflect the mean and s.e.m. of three independent biological replicates each performed in technical triplicate. FIG. 49B shows percent editing and indels for PE2, PE2 R110S K103L, Cas9 H840A nickase, or dCas9, together with a HEK3-targeting PEgRNA plasmid that encodes a +5 G to A edit. Editing efficiencies were measured on day 3 post-transfection from cells treated alongside of those used for assaying viability in FIG. 49A. Values and error bars reflect the mean and s.d. of three independent biological replicates.

[0140] FIGS. 50A-50B show PE3-mediated HBB E6V correction and HEXA 1278+TATC correction by various PEgRNAs. FIG. 50A shows a screen of 14 PEgRNAs for correction of the HBB E6V allele in HEK293T cells with PE3. All PEgRNAs evaluated convert the HBB E6V allele back to wild-type HBB without the introduction of any silent PAM mutation. FIG. 50B shows a screen of 41 PEgRNAs for correction of the HEXA 1278+TATC allele in HEK293T cells with PE3 or PE3b. Those PEgRNAs labeled HEXAs correct the pathogenic allele by a shifted 4-bp deletion that disrupts the PAM and leaves a silent mutation. Those PEgRNAs labeled HEXA correct the pathogenic allele back to wild-type. Entries ending in “b” use an edit-specific nicking sgRNA in combination with the PEgRNA (the PE3b system). Values and error bars reflect the mean and s.d. of three independent biological replicates.

[0141] FIGS. 51A-51G show a PE3 activity in human cell lines and a comparison of PE3 and Cas9-initiated HDR. Efficiency of generating the correct edit (without indels) and indel frequency for PE3 and Cas9-initiated HDR in HEK293T cells as shown in FIG. 51A, K562 cells as shown in FIG. 51B, U2OS cells as shown in FIG. 51C, and HeLa cells as shown in FIG. 51D. Each bracketed editing comparison installs identical edits with PE3 and Cas9-initiated HDR. Non-targeting controls are PE3 and a PEgRNA that targets a non-target locus.

[0142] FIG. 51E shows control experiments with non-targeting PEgRNA+PE3, and with dCas9+sgRNA, compared with wild-type Cas9 HDR experiments confirming that ssDNA donor HDR template, a common contaminant that artificially elevates apparent HDR efficiencies, does not contribute to the HDR measurements in FIGS. 51A-51D. FIGS. 51F-51G show example HEK3 site allele tables from genomic DNA samples isolated from K562 cells after editing with PE3 or with Cas9-initiated HDR. Alleles were sequenced on an Illumina MiSeq and analyzed with CRISPResso2¹⁷⁸. The reference HEK3 sequence from this region is at the top. Allele tables are shown for a non-targeting PEgRNA negative control, a +1 CTT insertion at HEK3 using PE3, and a +1 CTT insertion at HEK3 using Cas9-initiated HDR. Allele frequencies and corresponding Illumina sequencing read counts are shown for each allele. All alleles observed with frequency ≥0.20% are shown. Values and error bars reflect the mean and s.d. of three independent biological replicates.

[0143] FIGS. 52A-52D show distribution by length of pathogenic insertions, duplications, deletions, and indels in the ClinVar database. The ClinVar variant summary was downloaded from NCBI Jul. 15, 2019. The lengths of reported insertions, deletions, and duplications were calculated using reference and alternate alleles, variant start and stop positions, or appropriate identifying information in the variant name. Variants that did not report any of the above information were excluded from the analysis. The lengths of reported indels (single variants that include both insertions and deletions relative to the reference genome) were calculated by determining the number of mismatches or gaps in the best pairwise alignment between the reference and alternate alleles.

[0144] FIGS. 53A-53E show FACS gating examples for GFP-positive cell sorting. Below are examples of original batch analysis files outlining the sorting strategy used for generating HEXA 1278+TATC and HBB E6V HEK293T cell lines. The image data was generated on a Sony LE-MA900 cytometer using Cell Sorter Software v. 3.0.5. Graphic 1 shows gating plots for cells that do not express GFP. Graphic 2 shows an example sort of P2A-GFP-expressing cells used for isolating the HBB E6V HEK293T cell lines. HEK293T cells were initially gated on population using FSC-A/BSC-A (Gate A), then sorted for singlets using FSC-A/FSC-H (Gate B). Live cells were sorted for by gating DAPI-negative cells (Gate C). Cells with GFP fluorescence levels that were above those of the negative-control cells were sorted for using EGFP as the fluorochrome (Gate D). FIG. 53A shows HEK293T cells (GFP-negative). FIG. 53B shows a representative plot of FACS gating for cells expressing PE2-P2A-GFP. FIG. 53C shows the genotypes for HEXA 1278+TATC homozygote HEK293T cells. FIGS. 53D-53E show allele tables for HBB E6V homozygote HEK293T cell lines.

[0145] FIG. 54 is a schematic which summarizes the PEgRNA cloning procedure.

[0146] FIGS. 55A-55G are schematics of PEgRNA designs. FIG. 55A shows a simple diagram of PEgRNA with domains labeled (left) and bound to nCas9 at a genomic site (right). FIG. 55B shows various types of modifications to PEgRNA which are anticipated to increase activity. FIG. 55C shows modifications to PEgRNA to increase transcription of longer RNAs via promoter choice and 5′, 3′ processing and termination. FIG. 55D shows the lengthening of the P1 system, which is an example of a scaffold modification. FIG. 55E shows that the incorporation of synthetic modifications within the template region, or elsewhere within the PEgRNA, could increase activity. FIG. 55F shows that a designed incorporation of minimal secondary structure within the template could prevent formation of longer, more inhibitory, secondary structure. FIG. 55G shows a split PEgRNA with a second template sequence anchored by an RNA element at the 3′ end of the PEgRNA (left). Incorporation of elements at the 5′ or 3′ ends of the PEgRNA could enhance RT binding.

[0147] FIGS. 56A-56D show the incorporation of PEgRNA scaffold sequence into target loci. HTS data were analyzed for PEgRNA scaffold sequence insertion as described in FIGS. 60A-60B. FIG. 56A shows an analysis for the EMX1 locus. Shown is the % of total sequencing reads containing one or more PEgRNA scaffold sequence nucleotides within an insertion adjacent to the RT template (left); the percentage of total sequencing reads containing a PEgRNA scaffold sequence insertion of the specified length (middle); and the cumulative total percentage of PEgRNA insertion up to and including the length specified on the X axis. FIG. 56B shows the same as FIG. 56A, but for FANCF. FIG. 56C shows the same as in FIG. 56A but for HEK3. FIG. 56D shows the same as FIG. 56A but for RNF2. Values and error bars reflect the mean and s.d. of three independent biological replicates.

[0148] FIGS. 57A-57I show the effects of PE2, PE2-dRT, and Cas9 H840A nickase on transcriptome-wide RNA abundance. Analysis of cellular RNA, depleted for ribosomal RNA, isolated from HEK293T cells expressing PE2, PE2-dRT, or Cas9 H840A nickase and a PRNP-targeting or HEXA-targeting PEgRNA. RNAs corresponding to 14,410 genes and 14,368 genes were detected in PRNP and HEXA samples, respectively. FIGS. 57A-57F show Volcano plot displaying the −log 10 FDR-adjusted p-value vs. log2-fold change in transcript abundance for Aeach RNA, comparing (FIG. 57A) PE2 vs. PE2-dRT with PRNP-targeting PEgRNA, (FIG. 57B) PE2 vs. Cas9 H840A with PRNP-targeting PEgRNA, (FIG. 57C) PE2-dRT vs. Cas9 H840A with PRNP-targeting PEgRNA, (FIG. 57D) PE2 vs. PE2-dRT with HEXA-targeting PEgRNA, (FIG. 57E) PE2 vs. Cas9 H840A with HEXA-targeting PEgRNA, (FIG. 57F) PE2-dRT vs. Cas9 H840A with HEXA-targeting PEgRNA. [[Red[[Gray dots indicate genes that show ≥2-fold change in relative abundance that are statistically significant (FDR-adjusted p<0.05). FIGS. 57G-57I are Venn diagrams of upregulated and downregulated transcripts (≥2-fold change) comparing PRNP and HEXA samples for (FIG. 57G) PE2 vs PE2-dRT, (FIG. 57H) PE2 vs. Cas9 H840A, and (FIG. 57I) PE2-dRT vs. Cas9 H840A.

[0149] FIGS. 58A-58B show representative FACS gating for neuronal nuclei sorting. Nuclei were sequentially gated on the basis of DyeCycle Ruby signal, FSC/SSC ratio, SSC-Width/SSC-height ratio, and GFP/DyeCycle ratio.

[0150] FIGS. 59A-59G show the protocol for cloning 3′-extended PEgRNAs into mammalian U6 expression vectors by Golden Gate assembly. FIG. 59A shows the cloning overview. FIG. 59B shows ‘Step 1: Digest pU6-PEgRNA-GG-Vector plasmid (component 1)’. FIG. 59C shows ‘Steps 2 and 3: Order and anneal oligonucleotide parts (components 2, 3, and 4)’. FIG. 59D shows ‘Step 2.b.ii.: sgRNA scaffold phosphorylation (unnecessary if oligonucleotides were purchased phosphorylated)’. FIG. 59E shows ‘Step 4: PEgRNA assembly’. FIG. 59F shows ‘Steps 5 and 6: Transformation of assembled plasmids’. FIG. 59G shows a diagram summarizing the PEgRNA cloning protocol.

[0151] FIGS. 60A-60B show the Python script for quantifying PEgRNA scaffold integration. A custom python script was generated to characterize and quantify PEgRNA insertions at target genomic loci. The script iteratively matches text strings of increasing length taken from a reference sequence (guide RNA scaffold sequence) to the sequencing reads within fastq files, and counts the number of sequencing reads that match the search query. Each successive text string corresponds to an additional nucleotide of the guide RNA scaffold sequence. Exact length integrations and cumulative integrations up to a specified length were calculated in this manner. At the start of the reference sequence, 5 to 6 bases of the 3′ end of the new DNA strand synthesized by the reverse transcriptase are included to ensure alignment and accurate counting of short slices of the sgRNA.

[0152] FIG. 61 is a graph showing the percent of total sequencing reads with the specified edit for SaCas9(N580A)-MMLV RT HEK3+6 C>A. The values for the correct edits as well as indels are shown.

[0153] FIGS. 62A-62B show the importance of the protospacer for efficient installation of a desired edit at a precise location with prime editing. FIG. 62A is a graph showing the percent of total sequencing reads with target T●A base pairs converted to A●T for various HEK3 loci.

[0154] FIG. 62B is a sequence analysis showing the same.

[0155] FIG. 63 is a graph showing SpCas9 PAM variants in PAM editing (N=3). The percent of total sequencing reads with the targeted PAM edit is shown for SpCas9(H840A)-VRQR-MMLV RT, where NGA >NTA, and for SpCas9(H840A)-VRER-MMLV RT, where NGCG >NTCG. The PEgRNA primer binding site (PBS) length, RT template (RT) length, and PE system used are listed.

[0156] FIGS. 64A-64F depict a schematic showing the introduction of various site-specific recombinase (SSR) targets into the genome using PE. FIG. 64A provides a general schematic of the insertion of a recombinase target sequence by a prime editor. FIG. 64B shows how a single SSR target inserted by PE can be used as a site for genomic integration of a DNA donor template. FIG. 64C shows how a tandem insertion of SSR target sites can be used to delete a portion of the genome. FIG. 64D shows how a tandem insertion of SSR target sites can be used to invert a portion of the genome. FIG. 64E shows how the insertion of two SSR target sites at two distal chromosomal regions can result in chromosomal translocation. FIG. 64F shows how the insertion of two different SSR target sites in the genome can be used to exchange a cassette from a DNA donor template. See Example 17 for further details.

[0157] FIG. 65 shows in 1) the PE-mediated synthesis of a SSR target site in a human cell genome and 2) the use of that SSR target site to integrate a DNA donor template comprising a GFP expression marker. Once successfully integrated, the GFP causes the cell to fluoresce. See Example 17 for further details.

[0158] FIG. 66 depicts one embodiment of a prime editor being provided as two PE half proteins which regenerate as whole prime editor through the self-splicing action of the split-intein halves located at the end or beginning of each of the prime editor half proteins.

[0159] FIGS. 67A-67B depict the mechanism of intein removal from a polypeptide sequence and the reformation of a peptide bond between the N-terminal and the C-terminal extein sequences. FIG. 67A depicts the general mechanism of two half proteins each containing half of an intein sequence, which when in contact within a cell result in a fully-functional intein which then undergoes self-spicing and excision. The process of excision results in the formation of a peptide bond between the N-terminal protein half (or the “N extein”) and the C-terminal protein half (or the “C extein”) to form a whole, single polypeptide comprising the N extein and the C extein portions. In various embodiments, the N extein may correspond to the N-terminal half of a split prime editor fusion protein and the C extein may correspond to the C-terminal half of a split prime editor. FIG. 67B shows a chemical mechanism of intein excision and the reformation of a peptide bond that joins the N extein half (the bolded half) and the C extein half (the thin-lined half). Excision of the split inteins (i.e., the N intein and the C intein in the split intein configuration) may also be referred to as “trans splicing” as it involves the splicing action of two separate components provided in trans.

[0160] FIG. 68A demonstrates that delivery of both split intein halves of SpPE (SEQ ID NO: 762) at the linker maintains activity at three test loci when co-transfected into HEK293T cells.

[0161] FIG. 68B demonstrates that delivery of both split intein halves of SaPE2 (e.g., SEQ ID NO: 443 and SEQ ID NO: 450) recapitulate activity of full length SaPE2 (SEQ ID NO: 134) when co-transfected into HEK293T cells. Residues indicated in quotes are the sequence of amino acids 741-743 in SaCas9 (first residues of the C-terminal extein) which are important for the intein trans splicing reaction. ‘SMP’ are the native residues, which we also mutated to the ‘CFN’ consensus splicing sequence. The consensus sequence is shown to yield the highest reconstitution as measured by prime editing percentage.

[0162] FIG. 68C provides data showing that various disclosed PE ribonucleoprotein complexes (PE2 at high concentration, PE3 at high concentration and PE3 at low concentration) can be delivered in this manner.

[0163] FIG. 69 shows a bacteriophage plaque assay to determine PE effectiveness in PANCE. Plaques (dark circles) indicate phage able to successfully infect E. coli. Increasing concentration of L-rhamnose results in increased expression of PE and an increase in plaque formation. Sequencing of plaques revealed the presence of the PE-installed genomic edit.

[0164] FIGS. 70A-70I provide an example of an edited target sequence as an illustration of a step-by-step instruction for designing PEgRNAs and nicking-sgRNAs for prime editing. FIG. 70A: Step 1. Define the target sequence and the edit. Retrieve the sequence of the target DNA region (˜200 bp) centered around the location of the desired edit (point mutation, insertion, deletion, or combination thereof). FIG. 70B: Step 2. Locate target PAMs. Identify PAMs in proximity to the edit location. Be sure to look for PAMs on both strands. While PAMs close to the edit position are preferred, it is possible to install edits using protospacers and PAMs that place the nick ≥30 nt from the edit position. FIG. 70C: Step 3. Locate the nick sites. For each PAM being considered, identify the corresponding nick site. For Sp Cas9 H840A nickase, cleavage occurs in the PAM-containing strand between the 3^{rd} and 4^{th} bases 5′ to the NGG PAM. All edited nucleotides must exist 3′ of the nick site, so appropriate PAMs must place the nick 5′ to the target edit on the PAM-containing strand. In the example shown below, there are two possible PAMs. For simplicity, the remaining steps will demonstrate the design of a PEgRNA using PAM 1 only. FIG. 70D: Step 4. Design the spacer sequence. The protospacer of Sp Cas9 corresponds to the 20 nucleotides 5′ to the NGG PAM on the PAM-containing strand. Efficient Pol III transcription initiation requires a G to be the first transcribed nucleotide. If the first nucleotide of the protospacer is a G, the spacer sequence for the PEgRNA is simply the protospacer sequence. If the first nucleotide of the protospacer is not a G, the spacer sequence of the PEgRNA is G followed by the protospacer sequence. FIG. 70E: Step 5. Design a primer binding site (PBS). Using the starting allele sequence, identify the DNA primer on the PAM-containing strand. The 3′ end of the DNA primer is the nucleotide just upstream of the nick site (i.e. the 4^{th} base 5′ to the NGG PAM for Sp Cas9). As a general design principle for use with PE2 and PE3, a PEgRNA primer binding site (PBS) containing 12 to 13 nucleotides of complementarity to the DNA primer can be used for sequences that contain ˜40-60% GC content. For sequences with low GC content, longer (14- to 15-nt) PBSs should be tested. For sequences with higher GC content, shorter (8- to 11-nt) PBSs should be tested. Optimal PBS sequences should be determined empirically, regardless of GC content. To design a length-p PBS sequence, take the reverse complement of the first p nucleotides 5′ of the nick site in the PAM-containing strand using the starting allele sequence. FIG. 70F: Step 6. Design an RT template. The RT template encodes the designed edit and homology to the sequence adjacent to the edit. Optimal RT template lengths vary based on the target site. For short-range edits (positions +1 to +6), it is recommended to test a short (9 to 12 nt), a medium (13 to 16 nt), and a long (17 to 20 nt) RT template. For long-range edits (positions +7 and beyond), it is recommended to use RT templates that extend at least 5 nt (preferably 10 or more nt) past the position of the edit to allow for sufficient 3′ DNA flap homology. For long-range edits, several RT templates should be screened to identify functional designs. For larger insertions and deletions (≥5 nt), incorporation of greater 3′ homology (˜20 nt or more) into the RT template is recommended. Editing efficiency is typically impaired when the RT template encodes the synthesis of a G as the last nucleotide in the reverse transcribed DNA product (corresponding to a C in the RT template of the PEgRNA). As many RT templates support efficient prime editing, avoidance of G as the final synthesized nucleotide is recommended when designing RT templates. To design a length-r RT template sequence, use the desired allele sequence and take the reverse complement of the first r nucleotides 3′ of the nick site in the strand that originally contained the PAM. Note that compared to SNP edits, insertion or deletion edits using RT templates of the same length will not contain identical homology. FIG. 70G: Step 7. Assemble the full PEgRNA sequence. Concatenate the PEgRNA components in the following order (5′ to 3′): spacer, scaffold, RT template and PBS. FIG. 70H: Step 8. Designing nicking-sgRNAs for PE3. Identify PAMs on the non-edited strand upstream and downstream of the edit. Optimal nicking positions are highly locus-dependent and should be determined empirically. In general, nicks placed 40 to 90 nucleotides 5′ to the position across from the PEgRNA-induced nick lead to higher editing yields and fewer indels. A nicking sgRNA has a spacer sequence that matches the 20-nt protospacer in the starting allele, with the addition of a 5′-G if the protospacer does not begin with a G. FIG. 70I: Step 9. Designing PE3b nicking-sgRNAs. If a PAM exists in the complementary strand and its corresponding protospacer overlaps with the sequence targeted for editing, this edit could be a candidate for the PE3b system. In the PE3b system, the spacer sequence of the nicking-sgRNA matches the sequence of the desired edited allele, but not the starting allele. The PE3b system operates efficiently when the edited nucleotide(s) falls within the seed region (˜10 nt adjacent to the PAM) of the nicking-sgRNA protospacer. This prevents nicking of the complementary strand until after installation of the edited strand, preventing competition between the PEgRNA and the sgRNA for binding the target DNA. PE3b also avoids the generation of simultaneous nicks on both strands, thus reducing indel formation significantly while maintaining high editing efficiency. PE3b sgRNAs should have a spacer sequence that matches the 20-nt protospacer in the desired allele, with the addition of a 5′ G if needed.

[0165] FIG. 71A shows the nucleotide sequence of a SpCas9 PEgRNA molecule (top) which terminates at the 3′ end in a “UUU” and does not contain a toeloop element. The lower portion of the figure depicts the same SpCas9 PEgRNA molecule but is further modified to contain a toeloop element having the sequence 5′-“GAAANNNNN”-3′ inserted immediately before the “UUU” 3′ end. The “N” can be any nucleobase.

[0166] FIG. 71B shows the results of Example 18, which demonstrates that the efficiency of prime editing in HEK cells or EMX cells is increased using PEgRNA containing toeloop elements, whereas the percent of indel formation is largely unchanged.

[0167] FIGS. 72A-72C depict alternative PEgRNA configurations that can be used in prime editing. FIG. 72A depicts the PE2:PEgRNA embodiment of prime editing. This embodiment involves a PE2 (a fusion protein comprising a Cas9 and a reverse transcriptase) complexed with a PEgRNA (as also described in FIGS. 1A-1I and/or FIGS. 3A-3E). In this embodiment, the template for reverse transcription is incorporated into a 3′ extension arm on the sgRNA to make the PEgRNA, and the DNA polymerase enzyme is a reverse transcriptase (RT) fused directly to Cas9. FIG. 72B depicts the MS2cp-PE2:sgRNA+tPERT embodiment. This embodiment comprises a PE2 fusion (Cas9+a reverse transcriptase) that is further fused to the MS2 bacteriophage coat protein (MS2cp) to form the MS2cp-PE2 fusion protein. To achieve prime editing, the MS2cp-PE2 fusion protein is complexed with an sgRNA that targets the complex to a specific target site in the DNA. The embodiment then involves the introduction of a trans prime editing RNA template (“tPERT”), which operates in place of a PEgRNA by providing a primer binding site (PBS) and an DNA synthesis template on separate molecule, i.e., the tPERT, which is also equipped with a MS2 aptamer (stem loop). The MS2cp protein recruits the tPERT by binding to the MS2 aptamer of the molecule. FIG. 72C depicts alternative designs for PEgRNAs that can be achieved through known methods for chemical synthesis of nucleic acid molecules. For example, chemical synthesis can be used to synthesize a hybrid RNA/DNA PEgRNA molecule for use in prime editing, wherein the extension arm of the hybrid PEgRNA is DNA instead of RNA. In such an embodiment, a DNA-dependent DNA polymerase can be used in place of a reverse transcriptase to synthesize the 3′ DNA flap comprising the desired genetic change that is formed by prime editing. In another embodiment, the extension arm can be synthesized to include a chemical linker that prevents the DNA polymerase (e.g., a reverse transcriptase) from using the sgRNA scaffold or backbone as a template. In still another embodiment, the extension arm may comprise a DNA synthesis template that has the reverse orientation relative to the overall orientation of the PEgRNA molecule. For example, and as shown for a PEgRNA in the 5′-to-3′ orientation and with an extension attached to the 3′ end of the sgRNA scaffold, the DNA synthesis template is orientated in the opposite direction, i.e., the 3′-to-5′ direction. This embodiment may be advantageous for PEgRNA embodiments with extension arms positioned at the 3′ end of a gRNA. By reverse the orientation of the extension arm, the DNA synthesis by the polymerase (e.g., reverse transcriptase) will terminate once it reaches the newly orientated 5′ of the extension arm and will thus, not risk using the gRNA core as a template.

[0168] FIG. 73 demonstrates prime editing with tPERTs and the MS2 recruitment system (aka MS2 tagging technique). An sgRNA targeting the prime editor protein (PE2) to the target locus is expressed in combination with a tPERT containing a primer binding site (a13-nt or 17-nt PBS), an RT template encoding a His6 tag insertion and a homology arm, and an MS2 aptamer (located at the 5′ or 3′ end of the tPERT molecule). Either prime editor protein (PE2) or a fusion of the MS2cp to the N-terminus of PE2 was used. Editing was carried out with or without a complementary-strand nicking sgRNA, as in the previously developed PE3 system (designated in the x-axis as labels “PE2+nick” or “PE2”, respectively). This is also referred to and defined herein as “second-strand nicking.”

[0169] FIG. 74 demonstrates that the MS2 aptamer expression of the reverse transcriptase in trans and its recruitment with the MS2 aptamer system. The PEgRNAPEgRNA contains the MS2 RNA aptamer inserted into either one of two sgRNA scaffold hairpins. The wild-type M-MLV reverse transcriptase is expressed as an N-terminal or C-terminal fusion to the MS2 coat protein (MCP). Editing is at the HEK3 site in HEK293T cells.

[0170] FIG. 75 provides a bar graph comparing the efficiency (i.e., “% of total sequencing reads with the specified edit or indels”) of PE2, PE2-trunc, PE3, and PE3-trunc over different target sites in various cell lines. The data shows that the prime editors comprising the truncated RT variants were about as efficient as the prime editors comprising the non-truncated RT proteins.

[0171] FIG. 76 demonstrates the editing efficiency of intein-split prime editors fo Example 20. HEK239T cells were transfected with plasmids encoding full-length PE2 or intein-split PE2, PEgRNA and nicking guide RNA. Consensus sequence (most amino-terminal residues of C terminal extein) are indicated. Percent editing at two sites in shown: HEK3+1 CTT insertion and PRNP+6 G to T. Replicate n=3 independent transfections. See Example 20.

[0172] FIG. 77 demonstrates the editing efficiency of intein-split prime editors fo Example 20. Editing assessed by targeted deep sequencing in bulk cortex and GFP+subpopulation upon delivery of 5E10vg per SpPE3 half and a small amount 1E10 of nuclear-localized GFP:KASH to P0 mice by ICV injection. Editors and GFP were packaged in AAV9 with EFS promoter. Mice were harvested three weeks post injection and GFP+nuclei were isolated by flow cytometry. Individual data points are shown, with 1-2 mice per condition analyzed. See Example 20.

[0173] FIG. 78 demonstrates the editing efficiency of intein-split prime editors of Example 20. Specifically, the figures depicts the AAV split-SpPE3 constructs using in Example 20. Co-transduction by AAV particles separately expressing SpPE3-N and SpPE3-C recapitulates PE3 activity. Note N-terminal genome contains a U6-sgRNA cassette expressing the nicking sgRNA, and the C-terminal genome contains a U6-PEgRNA cassette expressing the PEgRNA. See Example 20.

[0174] FIG. 79 shows the editing efficiency of certain optimized linkers as discussed in Example 21. In particular, the data shows the editing efficiency of the PE2 construct with the current linker (noted as PE2—white box) compared to various versions with the linker replaced with a sequence as indicated at the HEK3, EMX1, FANCF, RNF2 loci for representative PEgRNAs for transition, transversion, insertion, and deletion edits. The replacement linkers are referred to as “1× SGGS”(SEQ ID NO: 174), “2×SGGS”(SEQ ID NO: 446), “3× SGGS” (SEQ ID NO: 3889), “1× XTEN” (SEQ ID NO: 171), “no linker”, “1× Gly”, “1× Pro”, “1× EAAAK”(SEQ ID NO: 3968), “2× EAAAK” ” (SEQ ID NO: 3969), and “3× EAAAK” (SEQ ID NO: 3970). The editing efficiency is measured in bar graph format relative to the “control” editing efficiency of PE2. The linker of PE2 is SGGSSGGSSGSETPGTSESATPESSGGSSGGSS (SEQ ID NO: 127). All editing was done in the context of the PE3 system, i.e., which refers the PE2 editing construct plus the addition of the optimal secondary sgRNA nicking guide. See Example 21.

[0175] FIG. 80. Taking the average fold efficacy relative to PE2 yields the graph shown, indicating that use of a 1× XTEN (SEQ ID NO: 171) linker sequence improves editing efficiency by 1.14 fold on average (n=15). See Example 21.

[0176] FIG. 81 depicts the transcription level of PEgRNAs from different promoters, as described in Example 22.

[0177] FIG. 82 As depicted in Example 22, impact of different types of modifications on PEgRNA structure on editing efficiency relative to unmodified PEgRNA.

[0178] FIG. 83 Depicts a PE experiment that targeted editing of the HEK3 gene, specifically targeting the insertion of a 10 nt insertion at position +1 relative to the nick site and using PE3. See Example 22.

[0179] FIG. 84A depicts an exemplary PEgRNA having a spacer, gRNA core, and an extension arm (RT template+primer binding site), which is modified at the 3′ end of the PEgRNA with a tRNA molecule, coupled through a UCU linker. The tRNA includes various post-transcriptional modifications. Said modification are not required, however.

[0180] FIG. 84B depicts structure of tRNA that can be used to modify PEgRNA structures. See Example 22. The P1 can be variable in length. The P1 can be extended to help prevent RNAseP processing of the PEgRNA-tRNA fusion.

[0181] FIG. 85 depicts a PE experiment that targeted editing of the FANCF gene, specifically targeting a G-to-T conversion at position +5 relative to the nick site and using PE3 construct. See Example 22.

[0182] FIG. 86 depicts a PE experiment that targeted editing of the HEK3 gene, specifically targeting the insertion of a 71 nt FLAG tag insertion at position +1 relative to the nick site and using PE3 construct. See Example 22.

[0183] FIG. 87 results from a screen in N2A cells where the pegRNA installs 1412Adel, with details about the primer binding site (PBS) length and reverse transcriptase (RT) template length. (Shown with and without indels). See Example 23.

[0184] FIG. 88 results from a screen in N2A cells where the pegRNA installs 1412Adel, with details about the primer binding site (PBS) length and reverse transcriptase (RT) template length. (Shown with and without indels). See Example 23.

[0185] FIG. 89 depicts results of editing at a proxy locus in the β-globin gene and at HEK3 in healthy HSCs, varying the concentration of editor to pegRNA and nicking gRNA. See Example 23.

[0186] FIG. 90 shows target DNA sequences after editing with various lineage PE guides. From top to bottom, and left to right, the sequences in FIG. 90 correspond to SEQ ID NOs: 752, 752, 753, 754, 754, 755, and 756.

### DEFINITIONS

[0187] Unless defined otherwise, all technical and scientific terms used herein have the meaning commonly understood by a person skilled in the art to which this invention belongs. The following references provide one of skill with a general definition of many of the terms used in this invention: Singleton et al., Dictionary of Microbiology and Molecular Biology (2nd ed. 1994); The Cambridge Dictionary of Science and Technology (Walker ed., 1988); The Glossary of Genetics, 5th Ed., R. Rieger et al. (eds.), Springer Verlag (1991); and Hale & Marham, The Harper Collins Dictionary of Biology (1991). As used herein, the following terms have the meanings ascribed to them unless specified otherwise.

### Antisense Strand

[0188] In genetics, the “antisense” strand of a segment within double-stranded DNA is the template strand, and which is considered to run in the 3′ to 5′ orientation. By contrast, the “sense” strand is the segment within double-stranded DNA that runs from 5′ to 3′, and which is complementary to the antisense strand of DNA, or template strand, which runs from 3′ to 5′. In the case of a DNA segment that encodes a protein, the sense strand is the strand of DNA that has the same sequence as the mRNA, which takes the antisense strand as its template during transcription, and eventually undergoes (typically, not always) translation into a protein. The antisense strand is thus responsible for the RNA that is later translated to protein, while the sense strand possesses a nearly identical makeup to that of the mRNA. Note that for each segment of dsDNA, there will possibly be two sets of sense and antisense, depending on which direction one reads (since sense and antisense is relative to perspective). It is ultimately the gene product, or mRNA, that dictates which strand of one segment of dsDNA is referred to as sense or antisense.

### Bi-Specific Ligand

[0189] The term “bi-specific ligand” or “bi-specific moiety,” as used herein, refers to a ligand that binds to two different ligand-binding domains. In certain embodiments, the ligand is a small molecule compound, or a peptide, or a polypeptide. In other embodiments, ligand-binding domain is a “dimerization domain,” which can be install as a peptide tag onto a protein. In various embodiments, two proteins each comprising the same or different dimerization domains can be induced to dimerize through the binding of each dimerization domain to the bi-specific ligand. As used herein, “bi-specific ligands” may be equivalently refer to “chemical inducers of dimerization” or “CIDs”.

### Cas9

[0190] The term “Cas9” or “Cas9 nuclease” refers to an RNA-guided nuclease comprising a Cas9 domain, or a fragment thereof (e.g., a protein comprising an active or inactive DNA cleavage domain of Cas9, and/or the gRNA binding domain of Cas9). A “Cas9 domain” as used herein, is a protein fragment comprising an active or inactive cleavage domain of Cas9 and/or the gRNA binding domain of Cas9. A “Cas9 protein” is a full length Cas9 protein. A Cas9 nuclease is also referred to sometimes as a casn1 nuclease or a CRISPR (Clustered Regularly Interspaced Short Palindromic Repeat)-associated nuclease. CRISPR is an adaptive immune system that provides protection against mobile genetic elements (viruses, transposable elements, and conjugative plasmids). CRISPR clusters contain spacers, sequences complementary to antecedent mobile elements, and target invading nucleic acids. CRISPR clusters are transcribed and processed into CRISPR RNA (crRNA). In type II CRISPR systems correct processing of pre-crRNA requires a trans-encoded small RNA (tracrRNA), endogenous ribonuclease 3 (rnc) and a Cas9 domain. The tracrRNA serves as a guide for ribonuclease 3-aided processing of pre-crRNA. Subsequently, Cas9/crRNA/tracrRNA endonucleolytically cleaves linear or circular dsDNA target complementary to the spacer. The target strand not complementary to crRNA is first cut endonucleolytically, then trimmed 3′-5′ exonucleolytically. In nature, DNA-binding and cleavage typically requires protein and both RNAs. However, single guide RNAs (“sgRNA”, or simply “gNRA”) can be engineered so as to incorporate aspects of both the crRNA and tracrRNA into a single RNA species. See, e.g., Jinek M., Chylinski K., Fonfara I., Hauer M., Doudna J. A., Charpentier E. Science 337:816-821(2012), the entire contents of which are hereby incorporated by reference. Cas9 recognizes a short motif in the CRISPR repeat sequences (the PAM or protospacer adjacent motif) to help distinguish self versus non-self. Cas9 nuclease sequences and structures are well known to those of skill in the art (see, e.g., “Complete genome sequence of an M1 strain of Streptococcus pyogenes.” Ferretti et al., J. J., McShan W. M., Ajdic D. J., Savic D. J., Savic G., Lyon K., Primeaux C., Sezate S., Suvorov A. N., Kenton S., Lai H. S., Lin S. P., Qian Y., Jia H. G., Najar F. Z., Ren Q., Zhu H., Song L., White J., Yuan X., Clifton S. W., Roe B. A., McLaughlin R. E., Proc. Natl. Acad. Sci. U.S.A. 98:4658-4663(2001); “CRISPR RNA maturation by trans-encoded small RNA and host factor RNase III.” Deltcheva E., Chylinski K., Sharma C. M., Gonzales K., Chao Y., Pirzada Z. A., Eckert M. R., Vogel J., Charpentier E., Nature 471:602-607(2011); and “A programmable dual-RNA-guided DNA endonuclease in adaptive bacterial immunity.” Jinek M., Chylinski K., Fonfara I., Hauer M., Doudna J. A., Charpentier E. Science 337:816-821(2012), the entire contents of each of which are incorporated herein by reference). Cas9 orthologs have been described in various species, including, but not limited to, S. pyogenes and S. thermophilus. Additional suitable Cas9 nucleases and sequences will be apparent to those of skill in the art based on this disclosure, and such Cas9 nucleases and sequences include Cas9 sequences from the organisms and loci disclosed in Chylinski, Rhun, and Charpentier, “The tracrRNA and Cas9 families of type II CRISPR-Cas immunity systems” (2013) RNA Biology 10:5, 726-737; the entire contents of which are incorporated herein by reference. In some embodiments, a Cas9 nuclease comprises one or more mutations that partially impair or inactivate the DNA cleavage domain.

[0191] A nuclease-inactivated Cas9 domain may interchangeably be referred to as a “dCas9” protein (for nuclease-“dead” Cas9). Methods for generating a Cas9 domain (or a fragment thereof) having an inactive DNA cleavage domain are known (see, e.g., Jinek et al., Science. 337:816-821(2012); Qi et al., “Repurposing CRISPR as an RNA-Guided Platform for Sequence-Specific Control of Gene Expression” (2013) Cell. 28; 152(5):1173-83, the entire contents of each of which are incorporated herein by reference). For example, the DNA cleavage domain of Cas9 is known to include two subdomains, the HNH nuclease subdomain and the RuvC1 subdomain. The HNH subdomain cleaves the strand complementary to the gRNA, whereas the RuvC1 subdomain cleaves the non-complementary strand. Mutations within these subdomains can silence the nuclease activity of Cas9. For example, the mutations D10A and H840A completely inactivate the nuclease activity of S. pyogenes Cas9 (Jinek et al., Science. 337:816-821(2012); Qi et al., Cell. 28; 152(5):1173-83 (2013)). In some embodiments, proteins comprising fragments of Cas9 are provided. For example, in some embodiments, a protein comprises one of two Cas9 domains: (1) the gRNA binding domain of Cas9; or (2) the DNA cleavage domain of Cas9. In some embodiments, proteins comprising Cas9 or fragments thereof are referred to as “Cas9 variants.” A Cas9 variant shares homology to Cas9, or a fragment thereof. For example, a Cas9 variant is at least about 70% identical, at least about 80% identical, at least about 90% identical, at least about 95% identical, at least about 96% identical, at least about 97% identical, at least about 98% identical, at least about 99% identical, at least about 99.5% identical, at least about 99.8% identical, or at least about 99.9% identical to wild type Cas9 (e.g., SpCas9 of SEQ ID NO: 18). In some embodiments, the Cas9 variant may have 1, 2, 3, 4, 5, 6, 7, 8, 9, 10, 11, 12, 13, 14, 15, 16, 17, 18, 19, 20, 21, 22, 21, 24, 25, 26, 27, 28, 29, 30, 31, 32, 33, 34, 35, 36, 37, 38, 39, 40, 41, 42, 43, 44, 45, 46, 47, 48, 49, 50, or more amino acid changes compared to wild type Cas9 (e.g., SpCas9 of SEQ ID NO: 18). In some embodiments, the Cas9 variant comprises a fragment of SEQ ID NO: 18 Cas9 (e.g., a gRNA binding domain or a DNA-cleavage domain), such that the fragment is at least about 70% identical, at least about 80% identical, at least about 90% identical, at least about 95% identical, at least about 96% identical, at least about 97% identical, at least about 98% identical, at least about 99% identical, at least about 99.5% identical, or at least about 99.9% identical to the corresponding fragment of wild type Cas9 (e.g., SpCas9 of SEQ ID NO: 18). In some embodiments, the fragment is at least 30%, at least 35%, at least 40%, at least 45%, at least 50%, at least 55%, at least 60%, at least 65%, at least 70%, at least 75%, at least 80%, at least 85%, at least 90%, at least 95% identical, at least 96%, at least 97%, at least 98%, at least 99%, or at least 99.5% of the amino acid length of a corresponding wild type Cas9 (e.g., SpCas9 of SEQ ID NO: 18).

cDNA

[0192] The term “cDNA” refers to a strand of DNA copied from an RNA template. cDNA is complementary to the RNA template.

### Circular Permutant

[0193] As used herein, the term “circular permutant” refers to a protein or polypeptide (e.g., a Cas9) comprising a circular permutation, which is change in the protein's structural configuration involving a change in order of amino acids appearing in the protein's amino acid sequence. In other words, circular permutants are proteins that have altered N- and C-termini as compared to a wild-type counterpart, e.g., the wild-type C-terminal half of a protein becomes the new N-terminal half. Circular permutation (or CP) is essentially the topological rearrangement of a protein's primary sequence, connecting its N- and C-terminus, often with a peptide linker, while concurrently splitting its sequence at a different position to create new, adjacent N- and C-termini. The result is a protein structure with different connectivity, but which often can have the same overall similar three-dimensional (3D) shape, and possibly include improved or altered characteristics, including, reduced proteolytic susceptibility, improved catalytic activity, altered substrate or ligand binding, and/or improved thermostability. Circular permutant proteins can occur in nature (e.g., concanavalin A and lectin). In addition, circular permutation can occur as a result of posttranslational modifications or may be engineered using recombinant techniques.

### Circularly Permuted Cas9

[0194] The term “circularly permuted Cas9” refers to any Cas9 protein, or variant thereof, that has been occurs as a circular permutant, whereby its N- and C-termini have been topically rearranged. Such circularly permuted Cas9 proteins (“CP-Cas9”), or variants thereof, retain the ability to bind DNA when complexed with a guide RNA (gRNA). See, Oakes et al., “Protein Engineering of Cas9 for enhanced function,” Methods Enzymol, 2014, 546: 491-511 and Oakes et al., “CRISPR-Cas9 Circular Permutants as Programmable Scaffolds for Genome Modification,” Cell, Jan. 10, 2019, 176: 254-267, each of are incorporated herein by reference. The instant disclosure contemplates any previously known CP-Cas9 or use a new CP-Cas9 so long as the resulting circularly permuted protein retains the ability to bind DNA when complexed with a guide RNA (gRNA). Exemplary CP-Cas9 proteins are SEQ ID NOs: 77-86.

### CRISPR

[0195] CRISPR is a family of DNA sequences (i.e., CRISPR clusters) in bacteria and archaea that represent snippets of prior infections by a virus that have invaded the prokaryote. The snippets of DNA are used by the prokaryotic cell to detect and destroy DNA from subsequent attacks by similar viruses and effectively compose, along with an array of CRISPR-associated proteins (including Cas9 and homologs thereof) and CRISPR-associated RNA, a prokaryotic immune defense system. In nature, CRISPR clusters are transcribed and processed into CRISPR RNA (crRNA). In certain types of CRISPR systems (e.g., type II CRISPR systems), correct processing of pre-crRNA requires a trans-encoded small RNA (tracrRNA), endogenous ribonuclease 3 (rnc) and a Cas9 protein. The tracrRNA serves as a guide for ribonuclease 3-aided processing of pre-crRNA. Subsequently, Cas9/crRNA/tracrRNA endonucleolytically cleaves linear or circular dsDNA target complementary to the RNA. Specifically, the target strand not complementary to crRNA is first cut endonucleolytically, then trimmed 3′-5′ exonucleolytically. In nature, DNA-binding and cleavage typically requires protein and both RNAs. However, single guide RNAs (“sgRNA”, or simply “gNRA”) can be engineered so as to incorporate aspects of both the crRNA and tracrRNA into a single RNA species—the guide RNA. See, e.g., Jinek M., Chylinski K., Fonfara I., Hauer M., Doudna J. A., Charpentier E. Science 337:816-821(2012), the entire contents of which is hereby incorporated by reference. Cas9 recognizes a short motif in the CRISPR repeat sequences (the PAM or protospacer adjacent motif) to help distinguish self versus non-self. CRISPR biology, as well as Cas9 nuclease sequences and structures are well known to those of skill in the art (see, e.g., “Complete genome sequence of an M1 strain of Streptococcus pyogenes.” Ferretti et al., J. J., McShan W. M., Ajdic D. J., Savic D. J., Savic G., Lyon K., Primeaux C., Sezate S., Suvorov A. N., Kenton S., Lai H. S., Lin S. P., Qian Y., Jia H. G., Najar F. Z., Ren Q., Zhu H., Song L., White J., Yuan X., Clifton S. W., Roe B. A., McLaughlin R. E., Proc. Natl. Acad. Sci. U.S.A. 98:4658-4663(2001); “CRISPR RNA maturation by trans-encoded small RNA and host factor RNase III.” Deltcheva E., Chylinski K., Sharma C. M., Gonzales K., Chao Y., Pirzada Z. A., Eckert M. R., Vogel J., Charpentier E., Nature 471:602-607(2011); and “A programmable dual-RNA-guided DNA endonuclease in adaptive bacterial immunity.” Jinek M., Chylinski K., Fonfara I., Hauer M., Doudna J. A., Charpentier E. Science 337:816-821(2012), the entire contents of each of which are incorporated herein by reference). Cas9 orthologs have been described in various species, including, but not limited to, S. pyogenes and S. thermophilus. Additional suitable Cas9 nucleases and sequences will be apparent to those of skill in the art based on this disclosure, and such Cas9 nucleases and sequences include Cas9 sequences from the organisms and loci disclosed in Chylinski, Rhun, and Charpentier, “The tracrRNA and Cas9 families of type II CRISPR-Cas immunity systems” (2013) RNA Biology 10:5, 726-737; the entire contents of which are incorporated herein by reference.

[0196] In certain types of CRISPR systems (e.g., type II CRISPR systems), correct processing of pre-crRNA requires a trans-encoded small RNA (tracrRNA), endogenous ribonuclease 3 (rnc), and a Cas9 protein. The tracrRNA serves as a guide for ribonuclease 3-aided processing of pre-crRNA. Subsequently, Cas9/crRNA/tracrRNA endonucleolytically cleaves linear or circular nucleic acid target complementary to the RNA. Specifically, the target strand not complementary to crRNA is first cut endonucleolytically, then trimmed 3′-5′ exonucleolytically. In nature, DNA-binding and cleavage typically requires protein and both RNAs. However, single guide RNAs (“sgRNA”, or simply “gRNA”) can be engineered so as to incorporate embodiments of both the crRNA and tracrRNA into a single RNA species—the guide RNA.

[0197] In general, a “CRISPR system” refers collectively to transcripts and other elements involved in the expression of or directing the activity of CRISPR-associated (“Cas”) genes, including sequences encoding a Cas gene, a tracr (trans-activating CRISPR) sequence (e.g. tracrRNA or an active partial tracrRNA), a tracr mate sequence (encompassing a “direct repeat” and a tracrRNA-processed partial direct repeat in the context of an endogenous CRISPR system), a guide sequence (also referred to as a “spacer” in the context of an endogenous CRISPR system), or other sequences and transcripts from a CRISPR locus. The tracrRNA of the system is complementary (fully or partially) to the tracr mate sequence present on the guide RNA.

### DNA Synthesis Template

[0198] As used herein, the term “DNA synthesis template” refers to the region or portion of the extension arm of a PEgRNA that is utilized as a template strand by a polymerase of a prime editor to encode a 3′ single-strand DNA flap that contains the desired edit and which then, through the mechanism of prime editing, replaces the corresponding endogenous strand of DNA at the target site. In various embodiments, the DNA synthesis template is shown in FIG. 3A (in the context of a PEgRNA comprising a 5′ extension arm), FIG. 3B (in the context of a PEgRNA comprising a 3′ extension arm), FIG. 3C (in the context of an internal extension arm), FIG. 3D (in the context of a 3′ extension arm), and FIG. 3E (in the context of a 5′ extension arm). The extension arm, including the DNA synthesis template, may be comprised of DNA or RNA. In the case of RNA, the polymerase of the prime editor can be an RNA-dependent DNA polymerase (e.g., a reverse transcriptase). In the case of DNA, the polymerase of the prime editor can be a DNA-dependent DNA polymerase. In various embodiments (e.g., as depicted in FIGS. 3D-3E), the DNA synthesis template (4) may comprise the “edit template” and the “homology arm”, and all or a portion of the optional 5′ end modifier region, e2. That is, depending on the nature of the e2 region (e.g., whether it includes a hairpin, toeloop, or stem/loop secondary structure), the polymerase may encode none, some, or all of the e2 region, as well. Said another way, in the case of a 3′ extension arm, the DNA synthesis template (3) can include the portion of the extension arm (3) that spans from the 5′ end of the primer binding site (PBS) to 3′ end of the gRNA core that may operate as a template for the synthesis of a single-strand of DNA by a polymerase (e.g., a reverse transcriptase). In the case of a 5′ extension arm, the DNA synthesis template (3) can include the portion of the extension arm (3) that spans from the 5′ end of the PEgRNA molecule to the 3′ end of the edit template. Preferably, the DNA synthesis template excludes the primer binding site (PBS) of PEgRNAs either having a 3′ extension arm or a 5′ extension arm. Certain embodiments described here (e.g, FIG. 71A) refer to an “an RT template,” which is inclusive of the edit template and the homology arm, i.e., the sequence of the PEgRNA extension arm which is actually used as a template during DNA synthesis. The term “RT template” is equivalent to the term “DNA synthesis template.”

[0199] In the case of trans prime editing (e.g., FIG. 3G and FIG. 3H), the primer binding site (PBS) and the DNA synthesis template can be engineered into a separate molecule referred to as a trans prime editor RNA template (tPERT).

### Dimerization Domain

[0200] The term “dimerization domain” refers to a ligand-binding domain that binds to a binding moiety of a bi-specific ligand. A “first” dimerization domain binds to a first binding moiety of a bi-specific ligand and a “second” dimerization domain binds to a second binding moiety of the same bi-specific ligand. When the first dimerization domain is fused to a first protein (e.g., via PE, as discussed herein) and the second dimerization domain (e.g., via PE, as discussed herein) is fused to a second protein, the first and second protein dimerize in the presence of a bi-specific ligand, wherein the bi-specific ligand has at least one moiety that binds to the first dimerization domain and at least another moiety that binds to the second dimerization domain.

### Downstream

[0201] As used herein, the terms “upstream” and “downstream” are terms of relativity that define the linear position of at least two elements located in a nucleic acid molecule (whether single or double-stranded) that is orientated in a 5′-to-3′ direction. In particular, a first element is upstream of a second element in a nucleic acid molecule where the first element is positioned somewhere that is 5′ to the second element. For example, a SNP is upstream of a Cas9-induced nick site if the SNP is on the 5′ side of the nick site. Conversely, a first element is downstream of a second element in a nucleic acid molecule where the first element is positioned somewhere that is 3′ to the second element. For example, a SNP is downstream of a Cas9-induced nick site if the SNP is on the 3′ side of the nick site. The nucleic acid molecule can be a DNA (double or single stranded). RNA (double or single stranded), or a hybrid of DNA and RNA. The analysis is the same for single strand nucleic acid molecule and a double strand molecule since the terms upstream and downstream are in reference to only a single strand of a nucleic acid molecule, except that one needs to select which strand of the double stranded molecule is being considered. Often, the strand of a double stranded DNA which can be used to determine the positional relativity of at least two elements is the “sense” or “coding” strand. In genetics, a “sense” strand is the segment within double-stranded DNA that runs from 5′ to 3′, and which is complementary to the antisense strand of DNA, or template strand, which runs from 3′ to 5′. Thus, as an example, a SNP nucleobase is “downstream” of a promoter sequence in a genomic DNA (which is double-stranded) if the SNP nucleobase is on the 3′ side of the promoter on the sense or coding strand.

### Edit Template

[0202] The term “edit template” refers to a portion of the extension arm that encodes the desired edit in the single strand 3′ DNA flap that is synthesized by the polymerase, e.g., a DNA-dependent DNA polymerase, RNA-dependent DNA polymerase (e.g., a reverse transcriptase). Certain embodiments described here (e.g., FIG. 71A) refer to “an RT template,” which refers to both the edit template and the homology arm together, i.e., the sequence of the PEgRNA extension arm which is actually used as a template during DNA synthesis. The term “RT edit template” is also equivalent to the term “DNA synthesis template,” but wherein the RT edit template reflects the use of a prime editor having a polymerase that is a reverse transcriptase, and wherein the DNA synthesis template reflects more broadly the use of a prime editor having any polymerase.

### Effective Amount

[0203] The term “effective amount,” as used herein, refers to an amount of a biologically active agent that is sufficient to elicit a desired biological response. For example, in some embodiments, an effective amount of a prime editor (PE) may refer to the amount of the editor that is sufficient to edit a target site nucleotide sequence, e.g., a genome. In some embodiments, an effective amount of a prime editor (PE) provided herein, e.g., of a fusion protein comprising a nickase Cas9 domain and a reverse transcriptase may refer to the amount of the fusion protein that is sufficient to induce editing of a target site specifically bound and edited by the fusion protein. As will be appreciated by the skilled artisan, the effective amount of an agent, e.g., a fusion protein, a nuclease, a hybrid protein, a protein dimer, a complex of a protein (or protein dimer) and a polynucleotide, or a polynucleotide, may vary depending on various factors as, for example, on the desired biological response, e.g., on the specific allele, genome, or target site to be edited, on the cell or tissue being targeted, and on the agent being used.

### Error-Prone Reverse Transcriptase

[0204] As used herein, the term “error-prone” reverse transcriptase (or more broadly, any polymerase) refers to a reverse transcriptase (or more broadly, any polymerase) that occurs naturally or which has been derived from another reverse transcriptase (e.g., a wild type M-MLV reverse transcriptase) which has an error rate that is less than the error rate of wild type M-MLV reverse transcriptase. The error rate of wild type M-MLV reverse transcriptase is reported to be in the range of one error in 15,000 (higher) to 27,000 (lower). An error rate of 1 in 15,000 corresponds with an error rate of 6.7×10⁻⁵. An error rate of 1 in 27,000 corresponds with an error rate of 3.7×10₋₅. See Boutabout et al. (2001) “DNA synthesis fidelity by the reverse transcriptase of the yeast retrotransposon Ty1,” Nucleic Acids Res 29(11):2217-2222, which is incorporated herein by reference. Thus, for purposes of this application, the term “error prone” refers to those RT that have an error rate that is greater than one error in 15,000 nucleobase incorporation (6.7×10⁻⁵ or higher), e.g., 1 error in 14,000 nucleobases (7.14×10⁻⁵ or higher), 1 error in 13,000 nucleobases or fewer (7.7×10⁻⁵ or higher), 1 error in 12,000 nucleobases or fewer (7.7×10⁻⁵ or higher), 1 error in 11,000 nucleobases or fewer (9.1×10⁻⁵ or higher), 1 error in 10,000 nucleobases or fewer (1×10⁻⁴ or 0.0001 or higher), 1 error in 9,000 nucleobases or fewer (0.00011 or higher), 1 error in 8,000 nucleobases or fewer (0.00013 or higher) 1 error in 7,000 nucleobases or fewer (0.00014 or higher), 1 error in 6,000 nucleobases or fewer (0.00016 or higher), 1 error in 5,000 nucleobases or fewer (0.0002 or higher), 1 error in 4,000 nucleobases or fewer (0.00025 or higher), 1 error in 3,000 nucleobases or fewer (0.00033 or higher), 1 error in 2,000 nucleobase or fewer (0.00050 or higher), or 1 error in 1,000 nucleobases or fewer (0.001 or higher), or 1 error in 500 nucleobases or fewer (0.002 or higher), or 1 error in 250 nucleobases or fewer (0.004 or higher).

### Extein

[0205] The term “extein,” as used herein, refers to an polypeptide sequence that is flanked by an intein and is ligated to another extein during the process of protein splicing to form a mature, spliced protein. Typically, an intein is flanked by two extein sequences that are ligated together when the intein catalyzes its own excision. Exteins, accordingly, are the protein analog to exons found in mRNA. For example, a polypeptide comprising an intein may be of the structure extein(N)—intein—extein(C). After excision of the intein and splicing of the two exteins, the resulting structures are extein(N)—extein(C) and a free intein. In various configurations, the exteins may be separate proteins (e.g., half of a Cas9 or PE fusion protein), each fused to a split-intein, wherein the excision of the split inteins causes the splicing together of the extein sequences.

### Extension Arm

[0206] The term “extension arm” refers to a nucleotide sequence component of a PEgRNA which provides several functions, including a primer binding site and an edit template for reverse transcriptase. In some embodiments, e.g., FIG. 3D, the extension arm is located at the 3′ end of the guide RNA. In other embodiments, e.g., FIG. 3E, the extension arm is located at the 5′ end of the guide RNA. In some embodiments, the extension arm also includes a homology arm. In various embodiments, the extension arm comprises the following components in a 5′ to 3′ direction: the homology arm, the edit template, and the primer binding site. Since polymerization activity of the reverse transcriptase is in the 5′ to 3′ direction, the preferred arrangement of the homology arm, edit template, and primer binding site is in the 5′ to 3′ direction such that the reverse transcriptase, once primed by an annealed primer sequence, polymerases a single strand of DNA using the edit template as a complementary template strand. Further details, such as the length of the extension arm, are described elsewhere herein.

[0207] The extension arm may also be described as comprising generally two regions: a primer binding site (PBS) and a DNA synthesis template, as shown in FIG. 3G (top), for instance. The primer binding site binds to the primer sequence that is formed from the endogenous DNA strand of the target site when it becomes nicked by the prime editor complex, thereby exposing a 3′ end on the endogenous nicked strand. As explained herein, the binding of the primer sequence to the primer binding site on the extension arm of the PEgRNA creates a duplex region with an exposed 3′ end (i.e., the 3′ of the primer sequence), which then provides a substrate for a polymerase to begin polymerizing a single strand of DNA from the exposed 3′ end along the length of the DNA synthesis template. The sequence of the single strand DNA product is the complement of the DNA synthesis template. Polymerization continues towards the 5′ of the DNA synthesis template (or extension arm) until polymerization terminates. Thus, the DNA synthesis template represents the portion of the extension arm that is encoded into a single strand DNA product (i.e., the 3′ single strand DNA flap containing the desired genetic edit information) by the polymerase of the prime editor complex and which ultimately replaces the corresponding endogenous DNA strand of the target site that sits immediate downstream of the PE-induced nick site. Without being bound by theory, polymerization of the DNA synthesis template continues towards the 5′ end of the extension arm until a termination event. Polymerization may terminate in a variety of ways, including, but not limited to (a) reaching a 5′ terminus of the PEgRNA (e.g., in the case of the 5′ extension arm wherein the DNA polymerase simply runs out of template), (b) reaching an impassable RNA secondary structure (e.g., hairpin or stem/loop), or (c) reaching a replication termination signal, e.g., a specific nucleotide sequence that blocks or inhibits the polymerase, or a nucleic acid topological signal, such as, supercoiled DNA or RNA.

### Flap Endonuclease (e.g., FEN1)

[0208] As used herein, the term “flap endonuclease” refers to an enzyme that catalyzes the removal of 5′ single strand DNA flaps. These are naturally occurring enzymes that process the removal of 5′ flaps formed during cellular processes, including DNA replication. The prime editing methods herein described may utilize endogenously supplied flap endonucleases or those provided in trans to remove the 5′ flap of endogenous DNA formed at the target site during prime editing. Flap endonucleases are known in the art and can be found described in Patel et al., “Flap endonucleases pass 5′-flaps through a flexible arch using a disorder-thread-order mechanism to confer specificity for free 5′-ends,” Nucleic Acids Research, 2012, 40(10): 4507-4519, Tsutakawa et al., “Human flap endonuclease structures, DNA double-base flipping, and a unified understanding of the FEN1 superfamily,” Cell, 2011, 145(2): 198-211, and Balakrishnan et al., “Flap Endonuclease 1,” Annu Rev Biochem, 2013, Vol 82: 119-138 (each of which are incorporated herein by reference). An exemplary flap endonuclease is FEN1, which can be represented by the following amino acid sequence:

| DESCRIPTION | SEQUENCE | SEQ ID NO: |
|---|---|---|
| FEN1 WILD | MGIQGLAKLIADVAPSAIRENDIKSYFGRKVAIDASMSI | SEQ ID NO: 7 |
| TYPE | YQFLIAVRQGGDVLQNEEGETTSHLMGMFYRTIRMME | |
| | NGIKPVYVFDGKPPQLKSGELAKRSERRAEAEKQLQQ | |
| | AQAAGAEQEVEKFTKRLVKVTKQHNDECKHLLSLMGI | |
| | PYLDAPSEAEASCAALVKAGKVYAAATEDMDCLTFGS | |
| | PVLMRHLTASEAKKLPIQEFHLSRILQELGLNQEQFVDL | |
| | CILLGSDYCESIRGIGPKRAVDLIQKHKSIEEIVRRLDPN | |
| | KYPVPENWLHKEAHQLFLEPEVLDPESVELKWSEPNE | |
| | EELIKFMCGEKQFSEERIRSGVKRLSKSRQGSTQGRLD | |
| | DFFKVTGSLSSAKRKEPEPKGSTKKKAKTGAAGKFKR | |
| | GK | |

### Functional Equivalent

[0209] The term “functional equivalent” refers to a second biomolecule that is equivalent in function, but not necessarily equivalent in structure to a first biomolecule. For example, a “Cas9 equivalent” refers to a protein that has the same or substantially the same functions as Cas9, but not necessarily the same amino acid sequence. In the context of the disclosure, the specification refers throughout to “a protein X, or a functional equivalent thereof.” In this context, a “functional equivalent” of protein X embraces any homolog, paralog, fragment, naturally occurring, engineered, mutated, or synthetic version of protein X which bears an equivalent function.

### Fusion Protein

[0210] The term “fusion protein” as used herein refers to a hybrid polypeptide which comprises protein domains from at least two different proteins. One protein may be located at the amino-terminal (N-terminal) portion of the fusion protein or at the carboxy-terminal (C-terminal) protein thus forming an “amino-terminal fusion protein” or a “carboxy-terminal fusion protein,” respectively. A protein may comprise different domains, for example, a nucleic acid binding domain (e.g., the gRNA binding domain of Cas9 that directs the binding of the protein to a target site) and a nucleic acid cleavage domain or a catalytic domain of a nucleic-acid editing protein. Another example includes a Cas9 or equivalent thereof to a reverse transcriptase. Any of the proteins provided herein may be produced by any method known in the art. For example, the proteins provided herein may be produced via recombinant protein expression and purification, which is especially suited for fusion proteins comprising a peptide linker. Methods for recombinant protein expression and purification are well known, and include those described by Green and Sambrook, Molecular Cloning: A Laboratory Manual (4^{th} ed., Cold Spring Harbor Laboratory Press, Cold Spring Harbor, N.Y. (2012)), the entire contents of which are incorporated herein by reference.

### Gene of Interest (GOI)

[0211] The term “gene of interest” or “GOT” refers to a gene that encodes a biomolecule of interest (e.g., a protein or an RNA molecule). A protein of interest can include any intracellular protein, membrane protein, or extracellular protein, e.g., a nuclear protein, transcription factor, nuclear membrane transporter, intracellular organelle associated protein, a membrane receptor, a catalytic protein, and enzyme, a therapeutic protein, a membrane protein, a membrane transport protein, a signal transduction protein, or an immunological protein (e.g., an IgG or other antibody protein), etc. The gene of interest may also encode an RNA molecule, including, but not limited to, messenger RNA (mRNA), transfer RNA (tRNA), ribosomal RNA (rRNA), small nuclear RNA (snRNA), antisense RNA, guide RNA, microRNA (miRNA), small interfering RNA (siRNA), and cell-free RNA (cfRNA).

### Guide RNA (“214NA”)

[0212] As used herein, the term “guide RNA” is a particular type of guide nucleic acid which is mostly commonly associated with a Cas protein of a CRISPR-Cas9 and which associates with Cas9, directing the Cas9 protein to a specific sequence in a DNA molecule that includes complementarity to protospacer sequence of the guide RNA. However, this term also embraces the equivalent guide nucleic acid molecules that associate with Cas9 equivalents, homologs, orthologs, or paralogs, whether naturally occurring or non-naturally occurring (e.g., engineered or recombinant), and which otherwise program the Cas9 equivalent to localize to a specific target nucleotide sequence. The Cas9 equivalents may include other napDNAbp from any type of CRISPR system (e.g., type II, V, VI), including Cpf1 (a type-V CRISPR-Cas systems), C2c1 (a type V CRISPR-Cas system), C2c2 (a type VI CRISPR-Cas system) and C2c3 (a type V CRISPR-Cas system). Further Cas-equivalents are described in Makarova et al., “C2c2 is a single-component programmable RNA-guided RNA-targeting CRISPR effector,” Science 2016; 353(6299), the contents of which are incorporated herein by reference. Exemplary sequences are and structures of guide RNAs are provided herein. In addition, methods for designing appropriate guide RNA sequences are provided herein. As used herein, the “guide RNA” may also be referred to as a “traditional guide RNA” to contrast it with the modified forms of guide RNA termed “prime editing guide RNAs” (or “PEgRNAs”) which have been invented for the prime editing methods and composition disclosed herein.

[0213] Guide RNAs or PEgRNAs may comprise various structural elements that include, but are not limited to:

[0214] Spacer sequence—the sequence in the guide RNA or PEgRNA (having about 20 nts in length) which binds to the protospacer in the target DNA.

[0215] gRNA core (or gRNA scaffold or backbone sequence)—refers to the sequence within the gRNA that is responsible for Cas9 binding, it does not include the 20 bp spacer/targeting sequence that is used to guide Cas9 to target DNA.

[0216] Extension arm—a single strand extension at the 3′ end or the 5′ end of the PEgRNA which comprises a primer binding site and a DNA synthesis template sequence that encodes via a polymerase (e.g., a reverse transcriptase) a single stranded DNA flap containing the genetic change of interest, which then integrates into the endogenous DNA by replacing the corresponding endogenous strand, thereby installing the desired genetic change.

[0217] Transcription terminator—the guide RNA or PEgRNA may comprise a transcriptional termination sequence at the 3′ of the molecule.

### Homology Arm

[0218] The term “homology arm” refers to a portion of the extension arm that encodes a portion of the resulting reverse transcriptase-encoded single strand DNA flap that is to be integrated into the target DNA site by replacing the endogenous strand. The portion of the single strand DNA flap encoded by the homology arm is complementary to the non-edited strand of the target DNA sequence, which facilitates the displacement of the endogenous strand and annealing of the single strand DNA flap in its place, thereby installing the edit. This component is further defined elsewhere. The homology arm is part of the DNA synthesis template since it is by definition encoded by the polymerase of the prime editors described herein.

### Host Cell

[0219] The term “host cell,” as used herein, refers to a cell that can host, replicate, and express a vector described herein, e.g., a vector comprising a nucleic acid molecule encoding a fusion protein comprising a Cas9 or Cas9 equivalent and a reverse transcriptase.

### Inteins

[0220] As used herein, the term “intein” refers to auto-processing polypeptide domains found in organisms from all domains of life. An intein (intervening protein) carries out a unique auto-processing event known as protein splicing in which it excises itself out from a larger precursor polypeptide through the cleavage of two peptide bonds and, in the process, ligates the flanking extein (external protein) sequences through the formation of a new peptide bond. This rearrangement occurs post-translationally (or possibly co-translationally), as intein genes are found embedded in frame within other protein-coding genes. Furthermore, intein-mediated protein splicing is spontaneous; it requires no external factor or energy source, only the folding of the intein domain. This process is also known as cis-protein splicing, as opposed to the natural process of trans-protein splicing with “split inteins.” Inteins are the protein equivalent of the self-splicing RNA introns (see Perler et al., Nucleic Acids Res. 22:1125-1127 (1994)), which catalyze their own excision from a precursor protein with the concomitant fusion of the flanking protein sequences, known as exteins (reviewed in Perler et al., Curr. Opin. Chem. Biol. 1:292-299 (1997); Perler, F. B. Cell 92(1):1-4 (1998); Xu et al., EMBO J. 15(19):5146-5153 (1996)).

[0221] As used herein, the term “protein splicing” refers to a process in which an interior region of a precursor protein (an intein) is excised and the flanking regions of the protein (exteins) are ligated to form the mature protein. This natural process has been observed in numerous proteins from both prokaryotes and eukaryotes (Perler, F. B., Xu, M. Q., Paulus, H. Current Opinion in Chemical Biology 1997, 1, 292-299; Perler, F. B. Nucleic Acids Research 1999, 27, 346-347). The intein unit contains the necessary components needed to catalyze protein splicing and often contains an endonuclease domain that participates in intein mobility (Perler, F. B., Davis, E. O., Dean, G. E., Gimble, F. S., Jack, W. E., Neff, N., Noren, C. J., Thomer, J., Belfort, M. Nucleic Acids Research 1994, 22, 1127-1127). The resulting proteins are linked, however, not expressed as separate proteins. Protein splicing may also be conducted in trans with split inteins expressed on separate polypeptides spontaneously combine to form a single intein which then undergoes the protein splicing process to join to separate proteins.

[0222] The elucidation of the mechanism of protein splicing has led to a number of intein-based applications (Comb, et al., U.S. Pat. No. 5,496,714; Comb, et al., U.S. Pat. No. 5,834,247; Camarero and Muir, J. Amer. Chem. Soc., 121:5597-5598 (1999); Chong, et al., Gene, 192:271-281 (1997), Chong, et al., Nucleic Acids Res., 26:5109-5115 (1998); Chong, et al., J. Biol. Chem., 273:10567-10577 (1998); Cotton, et al. J. Am. Chem. Soc., 121:1100-1101 (1999); Evans, et al., J. Biol. Chem., 274:18359-18363 (1999); Evans, et al., J. Biol. Chem., 274:3923-3926 (1999); Evans, et al., Protein Sci., 7:2256-2264 (1998); Evans, et al., J. Biol. Chem., 275:9091-9094 (2000); Iwai and Pluckthun, FEBS Lett. 459:166-172 (1999); Mathys, et al., Gene, 231:1-13 (1999); Mills, et al., Proc. Natl. Acad. Sci. USA 95:3543-3548 (1998); Muir, et al., Proc. Natl. Acad. Sci. USA 95:6705-6710 (1998); Otomo, et al., Biochemistry 38:16040-16044 (1999); Otomo, et al., J. Biolmol. NMR 14:105-114 (1999); Scott, et al., Proc. Natl. Acad. Sci. USA 96:13638-13643 (1999); Severinov and Muir, J. Biol. Chem., 273:16205-16209 (1998); Shingledecker, et al., Gene, 207:187-195 (1998); Southworth, et al., EMBO J. 17:918-926 (1998); Southworth, et al., Biotechniques, 27:110-120 (1999); Wood, et al., Nat. Biotechnol., 17:889-892 (1999); Wu, et al., Proc. Natl. Acad. Sci. USA 95:9226-9231 (1998a); Wu, et al., Biochim Biophys Acta 1387:422-432 (1998b); Xu, et al., Proc. Natl. Acad. Sci. USA 96:388-393 (1999); Yamazaki, et al., J. Am. Chem. Soc., 120:5591-5592 (1998)). Each reference is incorporated herein by reference.

### Ligand-Dependent Intein

[0223] The term “ligand-dependent intein,” as used herein refers to an intein that comprises a ligand-binding domain. Typically, the ligand-binding domain is inserted into the amino acid sequence of the intein, resulting in a structure intein (N)—ligand-binding domain—intein (C). Typically, ligand-dependent inteins exhibit no or only minimal protein splicing activity in the absence of an appropriate ligand, and a marked increase of protein splicing activity in the presence of the ligand. In some embodiments, the ligand-dependent intein does not exhibit observable splicing activity in the absence of ligand but does exhibit splicing activity in the presence of the ligand. In some embodiments, the ligand-dependent intein exhibits an observable protein splicing activity in the absence of the ligand, and a protein splicing activity in the presence of an appropriate ligand that is at least 5 times, at least 10 times, at least 50 times, at least 100 times, at least 150 times, at least 200 times, at least 250 times, at least 500 times, at least 1000 times, at least 1500 times, at least 2000 times, at least 2500 times, at least 5000 times, at least 10000 times, at least 20000 times, at least 25000 times, at least 50000 times, at least 100000 times, at least 500000 times, or at least 1000000 times greater than the activity observed in the absence of the ligand. In some embodiments, the increase in activity is dose dependent over at least 1 order of magnitude, at least 2 orders of magnitude, at least 3 orders of magnitude, at least 4 orders of magnitude, or at least 5 orders of magnitude, allowing for fine-tuning of intein activity by adjusting the concentration of the ligand. Suitable ligand-dependent inteins are known in the art, and in include those provided below and those described in published U.S. Patent Application U.S. 2014/0065711 A1; Mootz et al., “Protein splicing triggered by a small molecule.” J. Am. Chem. Soc. 2002; 124, 9044-9045; Mootz et al., “Conditional protein splicing: a new tool to control protein structure and function in vitro and in vivo.” J. Am. Chem. Soc. 2003; 125, 10561-10569; Buskirk et al., Proc. Natl. Acad. Sci. USA. 2004; 101, 10505-10510); Skretas & Wood, “Regulation of protein activity with small-molecule-controlled inteins.” Protein Sci. 2005; 14, 523-532; Schwartz, et al., “Post-translational enzyme activation in an animal via optimized conditional protein splicing.” Nat. Chem. Biol. 2007; 3, 50-54; Peck et al., Chem. Biol. 2011; 18 (5), 619-630; the entire contents of each are hereby incorporated by reference. Exemplary sequences are as follows:

| NAME | SEQUENCE OF LIGAND-DEPENDENT INTEIN |
|---|---|
| 2-4 INTEIN: | CLAEGTRIFDPVTGTTHRIEDVVDGRKPIHVVAAAKDGTLLARPVV |
| | SWFDQGTRDVIGLRIAGGAIVWATPDHKVLTEYGWRAAGELRKGD |
| | RVAGPGGSGNSLALSLTADQMVSALLDAEPPILYSEYDPTSPFSEAS |
| | MMGLLTNLADRELVHMINWAKRVPGFVDLTLHDQAHLLECAWLEI |
| | LMIGLVWRSMEHPGKLLFAPNLLLDRNQGKCVEGMVEIFDMLLAT |
| | SSRFRMMNLQGEEFVCLKSIILLNSGVYTFLSSTLKSLEEKDHIHRA |
| | LDKITDTLIHLMAKAGLTLQQQHQRLAQLLLILSHIRHMSNKGMEH |
| | LYSMKYKNVVPLYDLLLEMLDAHRLHAGGSGASRVQAFADALDD |
| | KFLHDMLAEELRYSVIREVLPTRRARTFDLEVEELHTLVAEGVVVH |
| | NC (SEQ ID NO: 8) |
| 3-2 INTEIN | CLAEGTRIFDPVTGTTHRIEDVVDGRKPIHVVAVAKDGTLLARPVVS |
| | WFDQGTRDVIGLRIAGGAIVWATPDHKVLTEYGWRAAGELRKGDR |
| | VAGPGGSGNSLALSLTADQMVSALLDAEPPILYSEYDPTSPFSEASM |
| | MGLLTNLADRELVHMINWAKRVPGFVDLTLHDQAHLLECAWLEIL |
| | MIGLVWRSMEHPGKLLFAPNLLLDRNQGKCVEGMVEIFDMLLATS |
| | SRFRMMNLQGEEFVCLKSIILLNSGVYTFLSSTLKSLEEKDHIHRAL |
| | DKITDTLIHLMAKAGLTLQQQHQRLAQLLLILSHIRHMSNKGMEHL |
| | YSMKYTNVVPLYDLLLEMLDAHRLHAGGSGASRVQAFADALDDK |
| | FLHDMLAEELRYSVIREVLPTRRARTFDLEVEELHTLVAEGVVVHN |
| | C (SEQ ID NO: 9) |
| 30R3-1 INTEIN | CLAEGTRIFDPVTGTTHRIEDVVDGRKPIHVVAAAKDGTLLARPVV |
| | SWFDQGTRDVIGLRIAGGATVWATPDHKVLTEYGWRAAGELRKG |
| | DRVAGPGGSGNSLALSLTADQMVSALLDAEPPIPYSEYDPTSPFSEA |
| | SMMGLLTNLADRELVHMINWAKRVPGFVDLTLHDQAHLLECAWL |
| | EILMIGLVWRSMEHPGKLLFAPNLLLDRNQGKCVEGMVEIFDMLL |
| | ATSSRFRMMNLQGEEFVCLKSIILLNSGVYTFLSSTLKSLEEKDHIH |
| | RALDKITDTLIHLMAKAGLTLQQQHQRLAQLLLILSHIRHMSNKGM |
| | EHLYSMKYKNVVPLYDLLLEMLDAHRLHAGGSGASRVQAFADAL |
| | DDKFLHDMLAEGLRYSVIREVLPTRRARTFDLEVEELHTLVAEGVV |
| | VHNC (SEQ ID NO: 10) |
| 30R3-2 INTEIN | CLAEGTRIFDPVTGTTHRIEDVVDGRKPIHVVAAAKDGTLLARPVV |
| | SWFDQGTRDVIGLRIAGGATVWATPDHKVLTEYGWRAAGELRKG |
| | DRVAGPGGSGNSLALSLTADQMVSALLDAEPPILYSEYDPTSPFSEA |
| | SMMGLLTNLADRELVHMINWAKRVPGFVDLTLHDQAHLLECAWL |
| | EILMIGLVWRSMEHPGKLLFAPNLLLDRNQGKCVEGMVEIFDMLL |
| | ATSSRFRMMNLQGEEFVCLKSIILLNSGVYTFLSSTLKSLEEKDHIH |
| | RALDKITDTLIHLMAKAGLTLQQQHQRLAQLLLILSHIRHMSNKGM |
| | EHLYSMKYKNVVPLYDLLLEMLDAHRLHAGGSGASRVQAFADAL |
| | DDKFLHDMLAEELRYSVIREVLPTRRARTFDLEVEELHTLVAEGVV |
| | VHNC (SEQ ID NO: 11) |
| 30R3-3 INTEIN | CLAEGTRIFDPVTGTTHRIEDVVDGRKPIHVVAAAKDGTLLARPVV |
| | SWFDQGTRDVIGLRIAGGATVWATPDHKVLTEYGWRAAGELRKG |
| | DRVAGPGGSGNSLALSLTADQMVSALLDAEPPIPYSEYDPTSPFSEA |
| | SMMGLLTNLADRELVHMINWAKRVPGFVDLTLHDQAHLLECAWL |
| | EILMIGLVWRSMEHPGKLLFAPNLLLDRNQGKCVEGMVEIFDMLL |
| | ATSSRFRMMNLQGEEFVCLKSIILLNSGVYTFLSSTLKSLEEKDHIH |
| | RALDKITDTLIHLMAKAGLTLQQQHQRLAQLLLILSHIRHMSNKGM |
| | EHLYSMKYKNVVPLYDLLLEMLDAHRLHAGGSGASRVQAFADAL |
| | DDKFLHDMLAEELRYSVIREVLPTRRARTFDLEVEELHTLVAEGVV |
| | VHNC (SEQ ID NO: 12) |
| 37R3-1 INTEIN | CLAEGTRIFDPVTGTTHRIEDVVDGRKPIHVVAAAKDGTLLARPVV |
| | SWFDQGTRDVIGLRIAGGATVWATPDHKVLTEYGWRAAGELRKG |
| | DRVAGPGGSGNSLALSLTADQMVSALLDAEPPILYSEYNPTSPFSEA |
| | SMMGLLTNLADRELVHMINWAKRVPGFVDLTLHDQAHLLERAWL |
| | EILMIGLVWRSMEHPGKLLFAPNLLLDRNQGKCVEGMVEIFDMLL |
| | ATSSRFRMMNLQGEEFVCLKSIILLNSGVYTFLSSTLKSLEEKDHIH |
| | RALDKITDTLIHLMAKAGLTLQQQHQRLAQLLLILSHIRHMSNKGM |
| | EHLYSMKYKNVVPLYDLLLEMLDAHRLHAGGSGASRVQAFADAL |
| | DDKFLHDMLAEGLRYSVIREVLPTRRARTFDLEVEELHTLVAEGVV |
| | VHNC((SEQ ID NO: 13) |
| 37R3-2 INTEIN | CLAEGTRIFDPVTGTTHRIEDVVDGRKPIHVVAAAKDGTLLARPVV |
| | SWFDQGTRDVIGLRIAGGAIVWATPDHKVLTEYGWRAAGELRKGD |
| | RVAGPGGSGNSLALSLTADQMVSALLDAEPPILYSEYDPTSPFSEAS |
| | MMGLLTNLADRELVHMINWAKRVPGFVDLTLHDQAHLLERAWLEI |
| | LMIGLVWRSMEHPGKLLFAPNLLLDRNQGKCVEGMVEIFDMLLAT |
| | SSRFRMMNLQGEEFVCLKSIILLNSGVYTFLSSTLKSLEEKDHIHRA |
| | LDKITDTLIHLMAKAGLTLQQQHQRLAQLLLILSHIRHMSNKGMEH |
| | LYSMKYKNVVPLYDLLLEMLDAHRLHAGGSGASRVQAFADALDD |
| | KFLHDMLAEGLRYSVIREVLPTRRARTFDLEVEELHTLVAEGVVVH |
| | NC (SEQ ID NO: 14) |
| 37R3-3 INTEIN | CLAEGTRIFDPVTGTTHRIEDVVDGRKPIHVVAVAKDGTLLARPVVS |
| | WFDQGTRDVIGLRIAGGATVWATPDHKVLTEYGWRAAGELRKGD |
| | RVAGPGGSGNSLALSLTADQMVSALLDAEPPILYSEYDPTSPFSEAS |
| | MMGLLTNLADRELVHMINWAKRVPGFVDLTLHDQAHLLERAWLEI |
| | LMIGLVWRSMEHPGKLLFAPNLLLDRNQGKCVEGMVEIFDMLLAT |
| | SSRFRMMNLQGEEFVCLKSIILLNSGVYTFLSSTLKSLEEKDHIHRA |
| | LDKITDTLIHLMAKAGLTLQQQHQRLAQLLLILSHIRHMSNKGMEH |
| | LYSMKYKNVVPLYDLLLEMLDAHRLHAGGSGASRVQAFADALDD |
| | KFLHDMLAEELRYSVIREVLPTRRARTFDLEVEELHTLVAEGVVVH |
| | NC (SEQ ID NO: 15) |

### Linker

[0224] The term “linker,” as used herein, refers to a molecule linking two other molecules or moieties. The linker can be an amino acid sequence in the case of a linker joining two fusion proteins. For example, a Cas9 can be fused to a reverse transcriptase by an amino acid linker sequence. The linker can also be a nucleotide sequence in the case of joining two nucleotide sequences together. For example, in the instant case, the traditional guide RNA is linked via a spacer or linker nucleotide sequence to the RNA extension of a prime editing guide RNA which may comprise a RT template sequence and an RT primer binding site. In other embodiments, the linker is an organic molecule, group, polymer, or chemical moiety. In some embodiments, the linker is 5-100 amino acids in length, for example, 5, 6, 7, 8, 9, 10, 11, 12, 13, 14, 15, 16, 17, 18, 19, 20, 21, 22, 23, 24, 25, 26, 27, 28, 29, 30, 30-35, 35-40, 40-45, 45-50, 50-60, 60-70, 70-80, 80-90, 90-100, 100-150, or 150-200 amino acids in length. Longer or shorter linkers are also contemplated.

### Isolated

[0225] “Isolated” means altered or removed from the natural state. For example, a nucleic 20 acid or a peptide naturally present in a living animal is not “isolated,” but the same nucleic acid or peptide partially or completely separated from the coexisting materials of its natural state is “isolated.” An isolated nucleic acid or protein can exist in substantially purified form, or can exist in a non-native environment such as, for example, a host cell.

[0226] In some embodiments, a gene of interest is encoded by an isolated nucleic acid. As used herein, the term “isolated,” refers to the characteristic of a material as provided herein being removed from its original or native environment (e.g., the natural environment if it is naturally occurring). Therefore, a naturally-occurring polynucleotide or protein or polypeptide present in a living animal is not isolated, but the same polynucleotide or polypeptide, separated by human intervention from some or all of the coexisting materials in the natural system, is isolated. An artificial or engineered material, for example, a non-naturally occurring nucleic acid construct, such as the expression constructs and vectors described herein, are, accordingly, also referred to as isolated. A material does not have to be purified in order to be isolated. Accordingly, a material may be part of a vector and/or part of a composition, and still be isolated in that such vector or composition is not part of the environment in which the material is found in nature.

### MS2 Tagging Technique

[0227] In various embodiments (e.g., as depicted in the embodiments of FIGS. 72-73 and in Example 19), the term “MS2 tagging technique” refers to the combination of an “RNA-protein interaction domain” (aka “RNA-protein recruitment domain or protein”) paired up with an RNA-binding protein that specifically recognizes and binds to the RNA-protein interaction domain, e.g., a specific hairpin structure. These types of systems can be leveraged to recruit a variety of functionalities to a prime editor complex that is bound to a target site. The MS2 tagging technique is based on the natural interaction of the MS2 bacteriophage coat protein (“MCP” or “MS2cp”) with a stem-loop or hairpin structure present in the genome of the phage, i.e., the “MS2 hairpin.” In the case of prime editing, the MS2 tagging technique comprises introducing the MS2 hairpin into a desired RNA molecule involved in prime editing (e.g., a PEgRNA or a tPERT), which then constitutes a specific interactable binding target for an RNA-binding protein that recognizes and binds to that structure. In the case of the MS2 hairpin, it is recognized and bound by the MS2 bacteriophage coat protein (MCP). And, if MCP is fused to another protein (e.g., a reverse transcriptase or other DNA polymerase), then the MS2 hairpin may be used to “recruit” that other protein in trans to the target site occupied by the prime editing complex.

[0228] The prime editors described herein may incorporate as an aspect any known RNA-protein interaction domain to recruit or “co-localize” specific functions of interest to a prime editor complex. A review of other modular RNA-protein interaction domains are described in the art, for example, in Johans son et al., “RNA recognition by the MS2 phage coat protein,” Sem Virol., 1997, Vol. 8(3): 176-185; Delebecque et al., “Organization of intracellular reactions with rationally designed RNA assemblies,” Science, 2011, Vol. 333: 470-474; Mali et al., “Cas9 transcriptional activators for target specificity screening and paired nickases for cooperative genome engineering,” Nat. Biotechnol., 2013, Vol. 31: 833-838; and Zalatan et al., “Engineering complex synthetic transcriptional programs with CRISPR RNA scaffolds,” Cell, 2015, Vol. 160: 339-350, each of which are incorporated herein by reference in their entireties. Other systems include the PP7 hairpin, which specifically recruits the PCP protein, and the “corn” hairpin, which specifically recruits the Com protein. See Zalatan et al.

[0229] The nucleotide sequence of the MS2 hairpin (or equivalently referred to as the “MS2 aptamer”) is:

(SEQ ID NO: 763)
GCCAACATGAGGATCACCCATGTCTGCAGGGCC.

[0230] The amino acid sequence of the MCP or MS2cp is:

(SEQ ID NO: 764)
GSASNFTQFVLVDNGGTGDVTVAPSNFANGVAEWISSNSRSQAYKVTCSV
RQSSAQNRKYTIKVEVPKVATQTVGGEELPVAGWRSYLNMELTIPIFATN
SDCELIVKAMQGLLKDGNPIPSAIAANSGIY.

[0231] The MS2 hairpin (or “MS2 aptamer”) may also be referred to as a type of “RNA effector recruitment domain”(or equivalently as “RNA-binding protein recruitment domain” or simply as “recruitment domain”) since it is a physical structure (e.g., a hairpin) that is installed into a PEgRNA or tPERT that effectively recruits other effector functions (e.g., RNA-binding proteins having various functions, such as DNA polymerases or other DNA-modifying enzymes) to the PEgRNA or rPERT that is so modified, and thus, co-localizing effector functions in trans to the prime editing machinery. This application is not intended to be limited in any way to any particular RNA effector recruitment domains and may include any available such domain, including the MS2 hairpin. Example 19 and FIG. 72(b) depicts the use of the MS2 aptamer joined to a DNA synthesis domain (i.e., the tPERT molecule) and a prime editor that comprises an MS2cp protein fused to a PE2 to cause the co-localization of the prime editor complex (MS2cp-PE2:sgRNA complex) bound to the target DNA site and the DNA synthesis domain of the tPERT molecule.

napDNAbp

[0232] As used herein, the term “nucleic acid programmable DNA binding protein” or “napDNAbp,” of which Cas9 is an example, refer to a proteins which use RNA:DNA hybridization to target and bind to specific sequences in a DNA molecule. Each napDNAbp is associated with at least one guide nucleic acid (e.g., guide RNA), which localizes the napDNAbp to a DNA sequence that comprises a DNA strand (i.e., a target strand) that is complementary to the guide nucleic acid, or a portion thereof (e.g., the protospacer of a guide RNA). In other words, the guide nucleic-acid “programs” the napDNAbp (e.g., Cas9 or equivalent) to localize and bind to a complementary sequence.

[0233] Without being bound by theory, the binding mechanism of a napDNAbp—guide RNA complex, in general, includes the step of forming an R-loop whereby the napDNAbp induces the unwinding of a double-strand DNA target, thereby separating the strands in the region bound by the napDNAbp. The guide RNA protospacer then hybridizes to the “target strand.” This displaces a “non-target strand” that is complementary to the target strand, which forms the single strand region of the R-loop. In some embodiments, the napDNAbp includes one or more nuclease activities, which then cut the DNA leaving various types of lesions. For example, the napDNAbp may comprises a nuclease activity that cuts the non-target strand at a first location, and/or cuts the target strand at a second location. Depending on the nuclease activity, the target DNA can be cut to form a “double-stranded break” whereby both strands are cut. In other embodiments, the target DNA can be cut at only a single site, i.e., the DNA is “nicked” on one strand. Exemplary napDNAbp with different nuclease activities include “Cas9 nickase” (“nCas9”) and a deactivated Cas9 having no nuclease activities (“dead Cas9” or “dCas9”). Exemplary sequences for these and other napDNAbp are provided herein.

### Nickase

[0234] The term “nickase” refers to a Cas9 with one of the two nuclease domains inactivated. This enzyme is capable of cleaving only one strand of a target DNA.

### Nuclear Localization Sequence (NLS)

[0235] The term “nuclear localization sequence” or “NLS” refers to an amino acid sequence that promotes import of a protein into the cell nucleus, for example, by nuclear transport. Nuclear localization sequences are known in the art and would be apparent to the skilled artisan. For example, NLS sequences are described in Plank et al., international PCT application, PCT/EP2000/011690, filed Nov. 23, 2000, published as WO/2001/038547 on May 31, 2001, the contents of which are incorporated herein by reference for its disclosure of exemplary nuclear localization sequences. In some embodiments, a NLS comprises the amino acid sequence

(SEQ ID NO: 16)
PKKKRKV
or
(SEQ ID NO: 17)
MDSLLMNRRKFLYQFKNVRWAKGRRETYLC.

### Nucleic Acid Molecule

[0236] The term “nucleic acid,” as used herein, refers to a polymer of nucleotides. The polymer may include natural nucleosides (i.e., adenosine, thymidine, guanosine, cytidine, uridine, deoxyadenosine, deoxythymidine, deoxyguanosine, and deoxycytidine), nucleoside analogs (e.g., 2-aminoadenosine, 2-thiothymidine, inosine, pyrrolo-pyrimidine, 3-methyl adenosine, 5-methylcytidine, C5 bromouridine, C5 fluorouridine, C5 iodouridine, C5 propynyl uridine, C5 propynyl cytidine, C5 methylcytidine, 7 deazaadenosine, 7 deazaguanosine, 8 oxoadenosine, 8 oxoguanosine, O(6) methylguanine, 4-acetylcytidine, 5-(carboxyhydroxymethyl)uridine, dihydrouridine, methylpseudouridine, 1-methyl adenosine, 1-methyl guanosine, N6-methyl adenosine, and 2-thiocytidine), chemically modified bases, biologically modified bases (e.g., methylated bases), intercalated bases, modified sugars (e.g., 2′-fluororibose, ribose, 2′-deoxyribose, 2′-O-methylcytidine, arabinose, and hexose), or modified phosphate groups (e.g., phosphorothioates and 5′ N phosphoramidite linkages).

### PEgRNA

[0237] As used herein, the terms “prime editing guide RNA” or “PEgRNA” or “extended guide RNA” refers to a specialized form of a guide RNA that has been modified to include one or more additional sequences for implementing the prime editing methods and compositions described herein. As described herein, the prime editing guide RNA comprise one or more “extended regions” of nucleic acid sequence. The extended regions may comprise, but are not limited to, single-stranded RNA or DNA. Further, the extended regions may occur at the 3′ end of a traditional guide RNA. In other arrangements, the extended regions may occur at the 5′ end of a traditional guide RNA. In still other arrangements, the extended region may occur at an intramolecular region of the traditional guide RNA, for example, in the gRNA core region which associates and/or binds to the napDNAbp. The extended region comprises a “DNA synthesis template” which encodes (by the polymerase of the prime editor) a single-stranded DNA which, in turn, has been designed to be (a) homologous with the endogenous target DNA to be edited, and (b) which comprises at least one desired nucleotide change (e.g., a transition, a transversion, a deletion, or an insertion) to be introduced or integrated into the endogenous target DNA. The extended region may also comprise other functional sequence elements, such as, but not limited to, a “primer binding site” and a “spacer or linker” sequence, or other structural elements, such as, but not limited to aptamers, stem loops, hairpins, toe loops (e.g., a 3′ toeloop), or an RNA-protein recruitment domain (e.g., MS2 hairpin). As used herein the “primer binding site” comprises a sequence that hybridizes to a single-strand DNA sequence having a 3′ end generated from the nicked DNA of the R-loop.

[0238] In certain embodiments, the PEgRNAs are represented by FIG. 3A, which shows a PEgRNA having a 5′ extension arm, a spacer, and a gRNA core. The 5′ extension further comprises in the 5′ to 3′ direction a reverse transcriptase template, a primer binding site, and a linker. As shown, the reverse transcriptase template may also be referred to more broadly as the “DNA synthesis template” where the polymerase of a prime editor described herein is not an RT, but another type of polymerase.

[0239] In certain other embodiments, the PEgRNAs are represented by FIG. 3B, which shows a PEgRNA having a 5′ extension arm, a spacer, and a gRNA core. The 5′ extension further comprises in the 5′ to 3′ direction a reverse transcriptase template, a primer binding site, and a linker. As shown, the reverse transcriptase template may also be referred to more broadly as the “DNA synthesis template” where the polymerase of a prime editor described herein is not an RT, but another type of polymerase.

[0240] In still other embodiments, the PEgRNAs are represented by FIG. 3D, which shows a PEgRNA having in the 5′ to 3′ direction a spacer (1), a gRNA core (2), and an extension arm (3). The extension arm (3) is at the 3′ end of the PEgRNA. The extension arm (3) further comprises in the 5′ to 3′ direction a “primer binding site” (A), an “edit template” (B), and a “homology arm” (C). The extension arm (3) may also comprise an optional modifier region at the 3′ and 5′ ends, which may be the same sequences or different sequences. In addition, the 3′ end of the PEgRNA may comprise a transcriptional terminator sequence. These sequence elements of the PEgRNAs are further described and defined herein.

[0241] In still other embodiments, the PEgRNAs are represented by FIG. 3E, which shows a PEgRNA having in the 5′ to 3′ direction an extension arm (3), a spacer (1), and a gRNA core (2). The extension arm (3) is at the 5′ end of the PEgRNA. The extension arm (3) further comprises in the 3′ to 5′ direction a “primer binding site” (A), an “edit template” (B), and a “homology arm” (C). The extension arm (3) may also comprise an optional modifier region at the 3′ and 5′ ends, which may be the same sequences or different sequences. The PEgRNAs may also comprise a transcriptional terminator sequence at the 3′ end. These sequence elements of the PEgRNAs are further described and defined herein.

### PE1

[0242] As used herein, “PE1” refers to a PE complex comprising a fusion protein comprising Cas9(H840A) and a wild type MMLV RT having the following structure: [NLS]-[Cas9(H840A)]-[linker]-[MMLV_RT(wt)]+a desired PEgRNA, wherein the PE fusion has the amino acid sequence of SEQ ID NO: 123, which is shown as follows;

(SEQ ID NO: 123)
MKRTADGSEFESPKKKRKVDKKYSIGLDIGTNSVGWAVITDEYKVPSKKF
KVLGNTDRHSIKKNLIGALLFDSGETAEATRLKRTARRRYTRRKNRICYL
QEIFSNEMAKVDDSFFHRLEESFLVEEDKKHERHPIFGNIVDEVAYHEKY
PTIYHLRKKLVDSTDKADLRLIYLALAHMIKFRGHFLIEGDLNPDNSDVD
KLFIQLVQTYNQLFEENPINASGVDAKAILSARLSKSRRLENLIAQLPGE
KKNGLFGNLIALSLGLTPNFKSNFDLAEDAKLQLSKDTYDDDLDNLLAQI
GDQYADLFLAAKNLSDAILLSDILRVNTEITKAPLSASMIKRYDEHHQDL
TLLKALVRQQLPEKYKEIFFDQSKNGYAGYIDGGASQEEFYKFIKPILEK
MDGTEELLVKLNREDLLRKQRTFDNGSIPHQIHLGELHAILRRQEDFYPF
LKDNREKIEKILTFRIPYYVGPLARGNSRFAWMTRKSEETITPWNFEEVV
DKGASAQSFIERMTNFDKNLPNEKVLPKHSLLYEYFTVYNELTKVKYVTE
GMRKPAFLSGEQKKAIVDLLFKTNRKVTVKQLKEDYFKKIECFDSVEISG
VEDRFNASLGTYHDLLKIIKDKDFLDNEENEDILEDIVLTLTLFEDREMI
EERLKTYAHLFDDKVMKQLKRRRYTGWGRLSRKLINGIRDKQSGKTILDF
LKSDGFANRNFMQLIHDDSLTFKEDIQKAQVSGQGDSLHEHIANLAGSPA
IKKGILQTVKVVDELVKVMGRHKPENIVIEMARENQTTQKGQKNSRERMK
RIEEGIKELGSQILKEHPVENTQLQNEKLYLYYLQNGRDMYVDQELDINR
LSDYDVDAIVPQSFLKDDSIDNKVLTRSDKNRGKSDNVPSEEVVKKMKNY
WRQLLNAKLITQRKFDNLTKAERGGLSELDKAGFIKRQLVETRQITKHVA
QILDSRMNTKYDENDKLIREVKVITLKSKLVSDFRKDFQFYKVREINNYH
HAHDAYLNAVVGTALIKKYPKLESEFVYGDYKVYDVRKMIAKSEQEIGKA
TAKYFFYSNIMNFFKTEITLANGEIRKRPLIETNGETGEIVWDKGRDFAT
VRKVLSMPQVNIVKKTEVQTGGFSKESILPKRNSDKLIARKKDWDPKKYG
GFDSPTVAYSVLVVAKVEKGKSKKLKSVKELLGITIMERSSFEKNPIDFL
EAKGYKEVKKDLIIKLPKYSLFELENGRKRMLASAGELQKGNELALPSKY
VNFLYLASHYEKLKGSPEDNEQKQLFVEQHKHYLDEIIEQISEFSKRVIL
ADANLDKVLSAYNKHRDKPIREQAENIIHLFTLTNLGAPAAFKYFDTTID
RKRYTSTKEVLDATLIHQSITGLYETRIDLSQLGGDSGGSSGGSSGSETP
GTSESATPESSGGSSGGSSTLNIEDEYRLHETSKEPDVSLGSTWLSDFPQ
AWAETGGMGLAVRQAPLIIPLKATSTPVSIKQYPMSQEARLGIKPHIQRL
LDQGILVPCQSPWNTPLLPVKKPGTNDYRPVQDLREVNKRVEDIHPTVPN
PYNLLSGLPPSHQWYTVLDLKDAFFCLRLHPTSQPLFAFEWRDPEMGISG
QLTWTRLPQGFKNSPTLFDEALHRDLADFRIQHPDLILLQYVDDLLLAAT
SELDCQQGTRALLQTLGNLGYRASAKKAQICQKQVKYLGYLLKEGQRWLT
EARKETVMGQPTPKTPRQLREFLGTAGFCRLWIPGFAEMAAPLYPLTKTG
TLFNWGPDQQKAYQEIKQALLTAPALGLPDLTKPFELFVDEKQGYAKGVL
TQKLGPWRRPVAYLSKKLDPVAAGWPPCLRMVAAIAVLTKDAGKLTMGQP
LVILAPHAVEALVKQPPDRWLSNARMTHYQALLLDTDRVQFGPVVALNPA
TLLPLPEEGLQHNCLDILAEAHGTRPDLTDQPLPDADHTWYTDGSSLLQE
GQRKAGAAVTTETEVIWAKALPAGTSAQRAELIALTQALKMAEGKKLNVY
TDSRYAFATAHIHGEIYRRRGLLTSEGKEIKNKDEILALLKALFLPKRLS
IIHCPGHQKGHSAEARGNRMADQAARKAAITETPDTSTLLLIENSSPSGG
SKRTADGSEFEPKKKRKV
KEY:
NUCLEAR LOCALIZATION SEQUENCE (NLS) TOP: (SEQ ID NO: 124), BOTTOM: (SEQ ID NO: 133)
CAS9(H840A) (SEQ ID NO: 126)
33-AMINO ACID LINKER (SEQ ID NO: 127)

[symbol]

[symbol]

### PE2

[0243] As used herein, “PE2” refers to a PE complex comprising a fusion protein comprising Cas9(H840A) and a variant MMLV RT having the following structure: [NLS]-[Cas9(H840A)]-[linkerHMMLV_RT(D200N)(T330P)(L603W)(T306K)(W313F)]+a desired PEgRNA, wherein the PE fusion has the amino acid sequence of SEQ ID NO: 134, which is shown as follows:

(SEQ ID NO: 134)
MKRTADGSEFESPKKKRKVDKKYSIGLDIGTNSVGWAVITDEYKVPSKKF
KVLGNTDRHSIKKNLIGALLFDSGETAEATRLKRTARRRYTRRKNRICYL
QEIFSNEMAKVDDSFFHRLEESFLVEEDKKHERHPIFGNIVDEVAYHEKY
PTIYHLRKKLVDSTDKADLRLIYLALAHMIKFRGHFLIEGDLNPDNSDVD
KLFIQLVQTYNQLFEENPINASGVDAKAILSARLSKSRRLENLIAQLPGE
KKNGLFGNLIALSLGLTPNFKSNFDLAEDAKLQLSKDTYDDDLDNLLAQI
GDQYADLFLAAKNLSDAILLSDILRVNTEITKAPLSASMIKRYDEHHQDL
TLLKALVRQQLPEKYKEIFFDQSKNGYAGYIDGGASQEEFYKFIKPILEK
MDGTEELLVKLNREDLLRKQRTFDNGSIPHQIHLGELHAILRRQEDFYPF
LKDNREKIEKILTFRIPYYVGPLARGNSRFAWMTRKSEETITPWNFEEVV
DKGASAQSFIERMTNFDKNLPNEKVLPKHSLLYEYFTVYNELTKVKYVTE
GMRKPAFLSGEQKKAIVDLLFKTNRKVTVKQLKEDYFKKIECFDSVEISG
VEDRFNASLGTYHDLLKIIKDKDFLDNEENEDILEDIVLTLTLFEDREMI
EERLKTYAHLFDDKVMKQLKRRRYTGWGRLSRKLINGIRDKQSGKTILDF
LKSDGFANRNFMQLIHDDSLTFKEDIQKAQVSGQGDSLHEHIANLAGSPA
IKKGILQTVKVVDELVKVMGRHKPENIVIEMARENQTTQKGQKNSRERMK
RIEEGIKELGSQILKEHPVENTQLQNEKLYLYYLQNGRDMYVDQELDINR
LSDYDVDAIVPQSFLKDDSIDNKVLTRSDKNRGKSDNVPSEEVVKKMKNY
WRQLLNAKLITQRKFDNLTKAERGGLSELDKAGFIKRQLVETRQITKHVA
QILDSRMNTKYDENDKLIREVKVITLKSKLVSDFRKDFQFYKVREINNYH
HAHDAYLNAVVGTALIKKYPKLESEFVYGDYKVYDVRKMIAKSEQEIGKA
TAKYFFYSNIMNFFKTEITLANGEIRKRPLIETNGETGEIVWDKGRDFAT
VRKVLSMPQVNIVKKTEVQTGGFSKESILPKRNSDKLIARKKDWDPKKYG
GFDSPTVAYSVLVVAKVEKGKSKKLKSVKELLGITIMERSSFEKNPIDFL
EAKGYKEVKKDLIIKLPKYSLFELENGRKRMLASAGELQKGNELALPSKY
VNFLYLASHYEKLKGSPEDNEQKQLFVEQHKHYLDEIIEQISEFSKRVIL
ADANLDKVLSAYNKHRDKPIREQAENIIHLFTLTNLGAPAAFKYFDTTID
RKRYTSTKEVLDATLIHQSITGLYETRIDLSQLGGDSGGSSGGSSGSETP
GTSESATPESSGGSSGGSSTLNIEDEYRLHETSKEPDVSLGSTWLSDFPQ
AWAETGGMGLAVRQAPLIIPLKATSTPVSIKQYPMSQEARLGIKPHIQRL
LDQGILVPCQSPWNTPLLPVKKPGTNDYRPVQDLREVNKRVEDIHPTVPN
PYNLLSGLPPSHQWYTVLDLKDAFFCLRLHPTSQPLFAFEWRDPEMGISG
QLTWTRLPQGFKNSPTLFNEALHRDLADFRIQHPDLILLQYVDDLLLAAT
SELDCQQGTRALLQTLGNLGYRASAKKAQICQKQVKYLGYLLKEGQRWLT
EARKETVMGQPTPKTPRQLREFLGKAGFCRLFIPGFAEMAAPLYPLTKPG
TLFNWGPDQQKAYQEIKQALLTAPALGLPDLTKPFELFVDEKQGYAKGVL
TQKLGPWRRPVAYLSKKLDPVAAGWPPCLRMVAAIAVLTKDAGKLTMGQP
LVILAPHAVEALVKQPPDRWLSNARMTHYQALLLDTDRVQFGPVVALNPA
TLLPLPEEGLQHNCLDILAEAHGTRPDLTDQPLPDADHTWYTDGSSLLQE
GQRKAGAAVTTETEVIWAKALPAGTSAQRAELIALTQALKMAEGKKLNVY
TDSRYAFATAHIHGEIYRRRGWLTSEGKEIKNKDEILALLKALFLPKRLS
IIHCPGHQKGHSAEARGNRMADQAARKAAITETPDTSTLLIENSSPSGG
KRTADGSEFEPKKKRKV
KEY:
NUCLEAR LOCALIZATION SEQUENCE (NLS)
TOP: (SEQ ID NO: 124), BOTTOM: (SEQ ID NO: 133)
CAS9(H840A) (SEQ ID NO: 137)
33-AMINO ACID LINKER (SEQ ID NO: 127)

[symbol]

[symbol]

### PE3

[0244] As used herein, “PE3” refers to PE2 plus a second-strand nicking guide RNA that complexes with the PE2 and introduces a nick in the non-edited DNA strand in order to induce preferential replacement of the edited strand.

### PE3b

[0245] As used herein, “PE3b” refers to PE3 but wherein the second-strand nicking guide RNA is designed for temporal control such that the second strand nick is not introduced until after the installation of the desired edit. This is achieved by designing a gRNA with a spacer sequence that matches only the edited strand, but not the original allele. Using this strategy, referred to hereafter as PE3b, mismatches between the protospacer and the unedited allele should disfavor nicking by the sgRNA until after the editing event on the PAM strand takes place.

### PE-Short

[0246] As used herein, “PE-short” refers to a PE construct that is fused to a C-terminally truncated reverse transcriptase, and has the following amino acid sequence:

(SEQ ID NO: 765)
MKRTADGSEFESPKKKRKVDKKYSIGLDIGTNSVGWAVITDEYKVPSKKF
KVLGNTDRHSIKKNLIGALLFDSGETAEATRLKRTARRRYTRRKNRICYL
QEIFSNEMAKVDDSFFHRLEESFLVEEDKKHERHPIFGNIVDEVAYHEKY
PTIYHLRKKLVDSTDKADLRLIYLALAHMIKFRGHFLIEGDLNPDNSDVD
KLFIQLVQTYNQLFEENPINASGVDAKAILSARLSKSRRLENLIAQLPGE
KKNGLFGNLIALSLGLTPNFKSNFDLAEDAKLQLSKDTYDDDLDNLLAQI
GDQYADLFLAAKNLSDAILLSDILRVNTEITKAPLSASMIKRYDEHHQDL
TLLKALVRQQLPEKYKEIFFDQSKNGYAGYIDGGASQEEFYKFIKPILEK
MDGTEELLVKLNREDLLRKQRTFDNGSIPHQIHLGELHAILRRQEDFYPF
LKDNREKIEKILTFRIPYYVGPLARGNSRFAWMTRKSEETITPWNFEEVV
DKGASAQSFIERMTNFDKNLPNEKVLPKHSLLYEYFTVYNELTKVKYVTE
GMRKPAFLSGEQKKAIVDLLFKTNRKVTVKQLKEDYFKKIECFDSVEISG
VEDRFNASLGTYHDLLKIIKDKDFLDNEENEDILEDIVLTLTLFEDREMI
EERLKTYAHLFDDKVMKQLKRRRYTGWGRLSRKLINGIRDKQSGKTILDF
LKSDGFANRNFMQLIHDDSLTFKEDIQKAQVSGQGDSLHEHIANLAGSPA
IKKGILQTVKVVDELVKVMGRHKPENIVIEMARENQTTQKGQKNSRERMK
RIEEGIKELGSQILKEHPVENTQLQNEKLYLYYLQNGRDMYVDQELDINR
LSDYDVDAIVPQSFLKDDSIDNKVLTRSDKNRGKSDNVPSEEVVKKMKNY
WRQLLNAKLITQRKFDNLTKAERGGLSELDKAGFIKRQLVETRQITKHVA
QILDSRMNTKYDENDKLIREVKVITLKSKLVSDFRKDFQFYKVREINNYH
HAHDAYLNAVVGTALIKKYPKLESEFVYGDYKVYDVRKMIAKSEQEIGKA
TAKYFFYSNIMNFFKTEITLANGEIRKRPLIETNGETGEIVWDKGFSKES
RDFATVRKVLSMPQVNIVKKTEVQTGGILPKRNSDKLIARKKDWDPKKYG
GFDSPTVAYSVLVVAKVEKGKSKKLKSVKELLGITIMERSSFEKNPIDFL
EAKGYKEVKKDLIIKLPKYSLFELENGRKRMLASAGELQKGNELALPSKY
VNFLYLASHYEKLKGSPEDNEQKQLFVEQHKHYLDEIIEQISEFSKRVIL
ADANLDKVLSAYNKHRDKPIREQAENIIHLFTLTNLGAPAAFKYFDTTID
RKRYTSTKEVLDATLIHQSITGLYETRIDLSQLGGDSGGSSGGSSGSETP
GTSESATPESSGGSSGGSSTLNIEDEYRLHETSKEPDVSLGSTWLSDFPQ
AWAETGGMGLAVRQAPLIIPLKATSTPVSIKQYPMSQEARLGIKPHIQRL
LDQGILVPCQSPWNTPLLPVKKPGTNDYRPVQDLREVNKRVEDIHPTVPN
PYNLLSGLPPSHQWYTVLDLKDAFFCLRLHPTSQPLFAFEWRDPEMGISG
QLTWTRLPQGFKNSPTLFNEALHRDLADFRIQHPDLILLQYVDDLLLAAT
SELDCQQGTRALLQTLGNLGYRASAKKAQICQKQVKYLGYLLKEGQRWLT
EARKETVMGQPTPKTPRQLREFLGKAGFCRLFIPGFAEMAAPLYPLTKPG
TLFNWGPDQQKAYQEIKQALLTAPALGLPDLTKPFELFVDEKQGYAKGVL
TQKLGPWRRPVAYLSKKLDPVAAGWPPCLRMVAAIAVLTKDAGKLTMGQP
LVILAPHAVEALVKQPPDRWLSNARMTHYQALLLDTDRVQFGPVVALNP
ATLLPLPEEGLQHNCLDNSRLINSGGSKRTADGSEFEPKKKRKV
KEY:
NUCLEAR LOCALIZATION SEQUENCE (NLS)
TOP: (SEQ ID NO: 124), BOTTOM: (SEQ ID NO: 133)
CAS9(H840A) (SEQ ID NO: 157)
33-AMINO ACID LINKER 1 (SEP ID NO: 127)
M-MLV TRUNCATED REVERSE TRANSCRIPTASE (SEQ ID NO:
766).

### Peptide Tag

[0247] The term “peptide tag” refers to a peptide amino acid sequence that is genetically fused to a protein sequence to impart one or more functions onto the proteins that facilitate the manipulation of the protein for various purposes, such as, visualization, purification, solubilization, and separation, etc. Peptide tags can include various types of tags categorized by purpose or function, which may include “affinity tags” (to facilitate protein purification), “solubilization tags” (to assist in proper folding of proteins), “chromatography tags” (to alter chromatographic properties of proteins), “epitope tags” (to bind to high affinity antibodies), “fluorescence tags” (to facilitate visualization of proteins in a cell or in vitro).

### Polymerase

[0248] As used herein, the term “polymerase” refers to an enzyme that synthesizes a nucleotide strand and which may be used in connection with the prime editor systems described herein. The polymerase can be a “template-dependent” polymerase (i.e., a polymerase which synthesizes a nucleotide strand based on the order of nucleotide bases of a template strand). The polymerase can also be a “template-independent” polymerase (i.e., a polymerase which synthesizes a nucleotide strand without the requirement of a template strand). A polymerase may also be further categorized as a “DNA polymerase” or an “RNA polymerase.” In various embodiments, the prime editor system comprises a DNA polymerase. In various embodiments, the DNA polymerase can be a “DNA-dependent DNA polymerase” (i.e., whereby the template molecule is a strand of DNA). In such cases, the DNA template molecule can be a PEgRNA, wherein the extension arm comprises a strand of DNA. In such cases, the PEgRNA may be referred to as a chimeric or hybrid PEgRNA which comprises an RNA portion (i.e., the guide RNA components, including the spacer and the gRNA core) and a DNA portion (i.e., the extension arm). In various other embodiments, the DNA polymerase can be an “RNA-dependent DNA polymerase” (i.e., whereby the template molecule is a strand of RNA). In such cases, the PEgRNA is RNA, i.e., including an RNA extension. The term “polymerase” may also refer to an enzyme that catalyzes the polymerization of nucleotide (i.e., the polymerase activity). Generally, the enzyme will initiate synthesis at the 3′-end of a primer annealed to a polynucleotide template sequence (e.g., such as a primer sequence annealed to the primer binding site of a PEgRNA), and will proceed toward the 5′ end of the template strand. A “DNA polymerase” catalyzes the polymerization of deoxynucleotides. As used herein in reference to a DNA polymerase, the term DNA polymerase includes a “functional fragment thereof”. A “functional fragment thereof” refers to any portion of a wild-type or mutant DNA polymerase that encompasses less than the entire amino acid sequence of the polymerase and which retains the ability, under at least one set of conditions, to catalyze the polymerization of a polynucleotide. Such a functional fragment may exist as a separate entity, or it may be a constituent of a larger polypeptide, such as a fusion protein.

### Prime Editing

[0249] As used herein, the term “prime editing” refers to a novel approach for gene editing using napDNAbps, a polymerase (e.g., a reverse transcriptase), and specialized guide RNAs that include a DNA synthesis template for encoding desired new genetic information (or deleting genetic information) that is then incorporated into a target DNA sequence. Certain embodiments of prime editing are described in the embodiments of FIGS. 1A-1H and FIG. 72(a)-72(c), among other figures.

[0250] Prime editing represents an entirely new platform for genome editing that is a versatile and precise genome editing method that directly writes new genetic information into a specified DNA site using a nucleic acid programmable DNA binding protein (“napDNAbp”) working in association with a polymerase (i.e., in the form of a fusion protein or otherwise provided in trans with the napDNAbp), wherein the prime editing system is programmed with a prime editing (PE) guide RNA (“PEgRNA”) that both specifies the target site and templates the synthesis of the desired edit in the form of a replacement DNA strand by way of an extension (either DNA or RNA) engineered onto a guide RNA (e.g., at the 5′ or 3′ end, or at an internal portion of a guide RNA). The replacement strand containing the desired edit (e.g., a single nucleobase substitution) shares the same (or is homologous to) sequence as the endogenous strand (immediately downstream of the nick site) of the target site to be edited (with the exception that it includes the desired edit). Through DNA repair and/or replication machinery, the endogenous strand downstream of the nick site is replaced by the newly synthesized replacement strand containing the desired edit. In some cases, prime editing may be thought of as a “search-and-replace” genome editing technology since the prime editors, as described herein, not only search and locate the desired target site to be edited, but at the same time, encode a replacement strand containing a desired edit which is installed in place of the corresponding target site endogenous DNA strand. The prime editors of the present disclosure relate, in part, to the discovery that the mechanism of target-primed reverse transcription (TPRT) or “prime editing” can be leveraged or adapted for conducting precision CRISPR/Cas-based genome editing with high efficiency and genetic flexibility (e.g., as depicted in various embodiments of FIGS. 1A-1F). TPRT is naturally used by mobile DNA elements, such as mammalian non-LTR retrotransposons and bacterial Group II introns^{28,29}. The inventors have herein used Cas protein-reverse transcriptase fusions or related systems to target a specific DNA sequence with a guide RNA, generate a single strand nick at the target site, and use the nicked DNA as a primer for reverse transcription of an engineered reverse transcriptase template that is integrated with the guide RNA. However, while the concept begins with prime editors that use reverse transcriptase as the DNA polymerase component, the prime editors described herein are not limited to reverse transcriptases but may include the use of virtually any DNA polymerase. Indeed, while the application throughout may refer to prime editors with “reverse transcriptases,” it is set forth here that reverse transcriptases are only one type of DNA polymerase that may work with prime editing. Thus, where ever the specification mentions a “reverse transcriptase,” the person having ordinary skill in the art should appreciate that any suitable DNA polymerase may be used in place of the reverse transcriptase. Thus, in one aspect, the prime editors may comprise Cas9 (or an equivalent napDNAbp) which is programmed to target a DNA sequence by associating it with a specialized guide RNA (i.e., PEgRNA) containing a spacer sequence that anneals to a complementary protospacer in the target DNA. The specialized guide RNA also contains new genetic information in the form of an extension that encodes a replacement strand of DNA containing a desired genetic alteration which is used to replace a corresponding endogenous DNA strand at the target site. To transfer information from the PEgRNA to the target DNA, the mechanism of prime editing involves nicking the target site in one strand of the DNA to expose a 3′-hydroxyl group. The exposed 3′-hydroxyl group can then be used to prime the DNA polymerization of the edit-encoding extension on PEgRNA directly into the target site. In various embodiments, the extension—which provides the template for polymerization of the replacement strand containing the edit—can be formed from RNA or DNA. In the case of an RNA extension, the polymerase of the prime editor can be an RNA-dependent DNA polymerase (such as, a reverse transcriptase). In the case of a DNA extension, the polymerase of the prime editor may be a DNA-dependent DNA polymerase. The newly synthesized strand (i.e., the replacement DNA strand containing the desired edit) that is formed by the herein disclosed prime editors would be homologous to the genomic target sequence (i.e., have the same sequence as) except for the inclusion of a desired nucleotide change (e.g., a single nucleotide change, a deletion, or an insertion, or a combination thereof). The newly synthesized (or replacement) strand of DNA may also be referred to as a single strand DNA flap, which would compete for hybridization with the complementary homologous endogenous DNA strand, thereby displacing the corresponding endogenous strand. In certain embodiments, the system can be combined with the use of an error-prone reverse transcriptase enzyme (e.g., provided as a fusion protein with the Cas9 domain, or provided in trans to the Cas9 domain). The error-prone reverse transcriptase enzyme can introduce alterations during synthesis of the single strand DNA flap. Thus, in certain embodiments, error-prone reverse transcriptase can be utilized to introduce nucleotide changes to the target DNA. Depending on the error-prone reverse transcriptase that is used with the system, the changes can be random or non-random. Resolution of the hybridized intermediate (comprising the single strand DNA flap synthesized by the reverse transcriptase hybridized to the endogenous DNA strand) can include removal of the resulting displaced flap of endogenous DNA (e.g., with a 5′ end DNA flap endonuclease, FEN1), ligation of the synthesized single strand DNA flap to the target DNA, and assimilation of the desired nucleotide change as a result of cellular DNA repair and/or replication processes. Because templated DNA synthesis offers single nucleotide precision for the modification of any nucleotide, including insertions and deletions, the scope of this approach is very broad and could foreseeably be used for myriad applications in basic science and therapeutics.

[0251] In various embodiments, prime editing operates by contacting a target DNA molecule (for which a change in the nucleotide sequence is desired to be introduced) with a nucleic acid programmable DNA binding protein (napDNAbp) complexed with a prime editing guide RNA (PEgRNA). In reference to FIG. 1G, the prime editing guide RNA (PEgRNA) comprises an extension at the 3′ or 5′ end of the guide RNA, or at an intramolecular location in the guide RNA and encodes the desired nucleotide change (e.g., single nucleotide change, insertion, or deletion). In step (a), the napDNAbp/extended gRNA complex contacts the DNA molecule and the extended gRNA guides the napDNAbp to bind to a target locus. In step (b), a nick in one of the strands of DNA of the target locus is introduced (e.g., by a nuclease or chemical agent), thereby creating an available 3′ end in one of the strands of the target locus. In certain embodiments, the nick is created in the strand of DNA that corresponds to the R-loop strand, i.e., the strand that is not hybridized to the guide RNA sequence, i.e., the “non-target strand.” The nick, however, could be introduced in either of the strands. That is, the nick could be introduced into the R-loop “target strand” (i.e., the strand hybridized to the protospacer of the extended gRNA) or the “non-target strand” (i.e., the strand forming the single-stranded portion of the R-loop and which is complementary to the target strand). In step (c), the 3′ end of the DNA strand (formed by the nick) interacts with the extended portion of the guide RNA in order to prime reverse transcription (i.e., “target-primed RT”). In certain embodiments, the 3′ end DNA strand hybridizes to a specific RT priming sequence on the extended portion of the guide RNA, i.e., the “reverse transcriptase priming sequence” or “primer binding site” on the PEgRNA. In step (d), a reverse transcriptase (or other suitable DNA polymerase) is introduced which synthesizes a single strand of DNA from the 3′ end of the primed site towards the 5′ end of the prime editing guide RNA. The DNA polymerase (e.g., reverse transcriptase) can be fused to the napDNAbp or alternatively can be provided in trans to the napDNAbp. This forms a single-strand DNA flap comprising the desired nucleotide change (e.g., the single base change, insertion, or deletion, or a combination thereof) and which is otherwise homologous to the endogenous DNA at or adjacent to the nick site. In step (e), the napDNAbp and guide RNA are released. Steps (f) and (g) relate to the resolution of the single strand DNA flap such that the desired nucleotide change becomes incorporated into the target locus. This process can be driven towards the desired product formation by removing the corresponding 5′ endogenous DNA flap that forms once the 3′ single strand DNA flap invades and hybridizes to the endogenous DNA sequence. Without being bound by theory, the cells endogenous DNA repair and replication processes resolves the mismatched DNA to incorporate the nucleotide change(s) to form the desired altered product. The process can also be driven towards product formation with “second strand nicking,” as exemplified in FIG. 1F. This process may introduce at least one or more of the following genetic changes: transversions, transitions, deletions, and insertions.

[0252] The term “prime editor (PE) system” or “prime editor (PE)” or “PE system” or “PE editing system” refers the compositions involved in the method of genome editing using target-primed reverse transcription (TPRT) describe herein, including, but not limited to the napDNAbps, reverse transcriptases, fusion proteins (e.g., comprising napDNAbps and reverse transcriptases), prime editing guide RNAs, and complexes comprising fusion proteins and prime editing guide RNAs, as well as accessory elements, such as second strand nicking components (e.g., second strand sgRNAs) and 5′ endogenous DNA flap removal endonucleases (e.g., FEN1) for helping to drive the prime editing process towards the edited product formation.

[0253] Although in the embodiments described thus far the PEgRNA constitutes a single molecule comprising a guide RNA (which itself comprises a spacer sequence and a gRNA core or scaffold) and a 5′ or 3′ extension arm comprising the primer binding site and a DNA synthesis template (e.g., see FIG. 3D, the PEgRNA may also take the form of two individual molecules comprised of a guide RNA and a trans prime editor RNA template (tPERT), which essentially houses the extension arm (including, in particular, the primer binding site and the DNA synthesis domain) and an RNA-protein recruitment domain (e.g., MS2 aptamer or hairpin) in the same molecule which becomes co-localized or recruited to a modified prime editor complex that comprises a tPERT recruiting protein (e.g., MS2cp protein, which binds to the MS2 aptamer). See FIG. 3G and FIG. 3H as an example of a tPERT that may be used with prime editing.

### Prime Editor

[0254] The term “prime editor” refers to the herein described fusion constructs comprising a napDNAbp (e.g., Cas9 nickase) and a reverse transcriptase and is capable of carrying out prime editing on a target nucleotide sequence in the presence of a PEgRNA (or “extended guide RNA”). The term “prime editor” may refer to the fusion protein or to the fusion protein complexed with a PEgRNA, and/or further complexed with a second-strand nicking sgRNA. In some embodiments, the prime editor may also refer to the complex comprising a fusion protein (reverse transcriptase fused to a napDNAbp), a PEgRNA, and a regular guide RNA capable of directing the second-site nicking step of the non-edited strand as described herein. In other embodiments, the reverse transcriptase component of the “primer editor” may be provided in trans.

### Primer Binding Site

[0255] The term “primer binding site” or “the PBS” refers to the nucleotide sequence located on a PEgRNA as component of the extension arm (typically at the 3′ end of the extension arm) and serves to bind to the primer sequence that is formed after Cas9 nicking of the target sequence by the prime editor. As detailed elsewhere, when the Cas9 nickase component of a prime editor nicks one strand of the target DNA sequence, a 3′-ended ssDNA flap is formed, which serves a primer sequence that anneals to the primer binding site on the PEgRNA to prime reverse transcription. FIGS. 27 and 28 show embodiments of the primer binding site located on a 3′ and 5′ extension arm, respectively.

### Promoter

[0256] The term “promoter” is art-recognized and refers to a nucleic acid molecule with a sequence recognized by the cellular transcription machinery and able to initiate transcription of a downstream gene. A promoter can be constitutively active, meaning that the promoter is always active in a given cellular context, or conditionally active, meaning that the promoter is only active in the presence of a specific condition. For example, a conditional promoter may only be active in the presence of a specific protein that connects a protein associated with a regulatory element in the promoter to the basic transcriptional machinery, or only in the absence of an inhibitory molecule. A subclass of conditionally active promoters are inducible promoters that require the presence of a small molecule “inducer” for activity. Examples of inducible promoters include, but are not limited to, arabinose-inducible promoters, Tet-on promoters, and tamoxifen-inducible promoters. A variety of constitutive, conditional, and inducible promoters are well known to the skilled artisan, and the skilled artisan will be able to ascertain a variety of such promoters useful in carrying out the instant invention, which is not limited in this respect.

### Protospacer

[0257] As used herein, the term “protospacer” refers to the sequence (˜20 bp) in DNA adjacent to the PAM (protospacer adjacent motif) sequence. The protospacer shares the same sequence as the spacer sequence of the guide RNA. The guide RNA anneals to the complement of the protospacer sequence on the target DNA (specifically, one strand thereof, i.e., the “target strand” versus the “non-target strand” of the target DNA sequence). In order for Cas9 to function it also requires a specific protospacer adjacent motif (PAM) that varies depending on the bacterial species of the Cas9 gene. The most commonly used Cas9 nuclease, derived from S. pyogenes, recognizes a PAM sequence of NGG that is found directly downstream of the target sequence in the genomic DNA, on the non-target strand. The skilled person will appreciate that the literature in the state of the art sometimes refers to the “protospacer” as the ˜20-nt target-specific guide sequence on the guide RNA itself, rather than referring to it as a “spacer.” Thus, in some cases, the term “protospacer” as used herein may be used interchangeably with the term “spacer.” The context of the description surrounding the appearance of either “protospacer” or “spacer” will help inform the reader as to whether the term is in reference to the gRNA or the DNA target.

### Protospacer Adjacent Motif (PAM)

[0258] As used herein, the term “protospacer adjacent sequence” or “PAM” refers to an approximately 2-6 base pair DNA sequence that is an important targeting component of a Cas9 nuclease. Typically, the PAM sequence is on either strand, and is downstream in the 5′ to 3′ direction of Cas9 cut site. The canonical PAM sequence (i.e., the PAM sequence that is associated with the Cas9 nuclease of Streptococcus pyogenes or SpCas9) is 5′-NGG-3′ wherein “N” is any nucleobase followed by two guanine (“G”) nucleobases. Different PAM sequences can be associated with different Cas9 nucleases or equivalent proteins from different organisms. In addition, any given Cas9 nuclease, e.g., SpCas9, may be modified to alter the PAM specificity of the nuclease such that the nuclease recognizes alternative PAM sequence.

[0259] For example, with reference to the canonical SpCas9 amino acid sequence is SEQ ID NO: 18, the PAM sequence can be modified by introducing one or more mutations, including (a) D1135V, R1335Q, and T1337R “the VQR variant”, which alters the PAM specificity to NGAN or NGNG, (b) D1135E, R1335Q, and T1337R “the EQR variant”, which alters the PAM specificity to NGAG, and (c) D1135V, G1218R, R1335E, and T1337R “the VRER variant”, which alters the PAM specificity to NGCG. In addition, the D1135E variant of canonical SpCas9 still recognizes NGG, but it is more selective compared to the wild type SpCas9 protein.

[0260] It will also be appreciated that Cas9 enzymes from different bacterial species (i.e., Cas9 orthologs) can have varying PAM specificities. For example, Cas9 from Staphylococcus aureus (SaCas9) recognizes NGRRT or NGRRN. In addition, Cas9 from Neisseria meningitis (NmCas) recognizes NNNNGATT. In another example, Cas9 from Streptococcus thermophilis (StCas9) recognizes NNAGAAW. In still another example, Cas9 from Treponema denticola (TdCas) recognizes NAAAAC. These are example are not meant to be limiting. It will be further appreciated that non-SpCas9s bind a variety of PAM sequences, which makes them useful when no suitable SpCas9 PAM sequence is present at the desired target cut site. Furthermore, non-SpCas9s may have other characteristics that make them more useful than SpCas9. For example, Cas9 from Staphylococcus aureus (SaCas9) is about 1 kilobase smaller than SpCas9, so it can be packaged into adeno-associated virus (AAV). Further reference may be made to Shah et al., “Protospacer recognition motifs: mixed identities and functional diversity,” RNA Biology, 10(5): 891-899 (which is incorporated herein by reference).

### Recombinase

[0261] The term “recombinase,” as used herein, refers to a site-specific enzyme that mediates the recombination of DNA between recombinase recognition sequences, which results in the excision, integration, inversion, or exchange (e.g., translocation) of DNA fragments between the recombinase recognition sequences. Recombinases can be classified into two distinct families: serine recombinases (e.g., resolvases and invertases) and tyrosine recombinases (e.g., integrases). Examples of serine recombinases include, without limitation, Hin, Gin, Tn3, β-six, CinH, ParA, γδ, Bxb1, ϕC31, TP901, TG1, φBT1, R4, φRV1, φFC1, MR11, A118, U153, and gp29. Examples of tyrosine recombinases include, without limitation, Cre, FLP, R, Lambda, HK101, HK022, and pSAM2. The serine and tyrosine recombinase names stem from the conserved nucleophilic amino acid residue that the recombinase uses to attack the DNA and which becomes covalently linked to the DNA during strand exchange. Recombinases have numerous applications, including the creation of gene knockouts/knock-ins and gene therapy applications. See, e.g., Brown et al., “Serine recombinases as tools for genome engineering.” Methods. 2011; 53(4):372-9; Hirano et al., “Site-specific recombinases as tools for heterologous gene integration.” Appl. Microbiol. Biotechnol. 2011; 92(2):227-39; Chavez and Calos, “Therapeutic applications of the ΦC31 integrase system.” Curr. Gene Ther. 2011; 11(5):375-81; Turan and Bode, “Site-specific recombinases: from tag-and-target-to tag-and-exchange-based genomic modifications.” FASEB J. 2011; 25(12):4088-107; Venken and Bellen, “Genome-wide manipulations of Drosophila melanogaster with transposons, Flp recombinase, and ΦC31 integrase.” Methods Mol. Biol. 2012; 859:203-28; Murphy, “Phage recombinases and their applications.” Adv. Virus Res. 2012; 83:367-414; Zhang et al., “Conditional gene manipulation: Cre-ating a new biological era.” J. Zhejiang Univ. Sci. B. 2012; 13(7):511-24; Karpenshif and Bernstein, “From yeast to mammals: recent advances in genetic control of homologous recombination.” DNA Repair (Amst). 2012; 1; 11(10):781-8; the entire contents of each are hereby incorporated by reference in their entirety. The recombinases provided herein are not meant to be exclusive examples of recombinases that can be used in embodiments of the invention. The methods and compositions of the invention can be expanded by mining databases for new orthogonal recombinases or designing synthetic recombinases with defined DNA specificities (See, e.g., Groth et al., “Phage integrases: biology and applications.” J. Mol. Biol. 2004; 335, 667-678; Gordley et al., “Synthesis of programmable integrases.” Proc. Natl. Acad. Sci. USA. 2009; 106, 5053-5058; the entire contents of each are hereby incorporated by reference in their entirety). Other examples of recombinases that are useful in the methods and compositions described herein are known to those of skill in the art, and any new recombinase that is discovered or generated is expected to be able to be used in the different embodiments of the invention. In some embodiments, the catalytic domains of a recombinase are fused to a nuclease-inactivated RNA-programmable nuclease (e.g., dCas9, or a fragment thereof), such that the recombinase domain does not comprise a nucleic acid binding domain or is unable to bind to a target nucleic acid (e.g., the recombinase domain is engineered such that it does not have specific DNA binding activity). Recombinases lacking DNA binding activity and methods for engineering such are known, and include those described by Klippel et al., “Isolation and characterisation of unusual gin mutants.” EMBO J. 1988; 7: 3983-3989: Burke et al., “Activating mutations of Tn3 resolvase marking interfaces important in recombination catalysis and its regulation. Mol Microbiol. 2004; 51: 937-948; Olorunniji et al., “Synapsis and catalysis by activated Tn3 resolvase mutants.” Nucleic Acids Res. 2008; 36: 7181-7191; Rowland et al., “Regulatory mutations in Sin recombinase support a structure-based model of the synaptosome.” Mol Microbiol. 2009; 74: 282-298; Akopian et al., “Chimeric recombinases with designed DNA sequence recognition.” Proc Natl Acad Sci USA. 2003; 100: 8688-8691; Gordley et al., “Evolution of programmable zinc finger-recombinases with activity in human cells. J Mol Biol. 2007; 367: 802-813; Gordley et al., “Synthesis of programmable integrases.” Proc Natl Acad Sci USA. 2009; 106: 5053-5058; Arnold et al., “Mutants of Tn3 resolvase which do not require accessory binding sites for recombination activity.” EMBO J. 1999; 18: 1407-1414; Gaj et al., “Structure-guided reprogramming of serine recombinase DNA sequence specificity.” Proc Natl Acad Sci USA. 2011; 108(2):498-503; and Proudfoot et al., “Zinc finger recombinases with adaptable DNA sequence specificity.” PLoS One. 2011; 6(4):e19537; the entire contents of each are hereby incorporated by reference. For example, serine recombinases of the resolvase-invertase group, e.g., Tn3 and γδ resolvases and the Hin and Gin invertases, have modular structures with autonomous catalytic and DNA-binding domains (See, e.g., Grindley et al., “Mechanism of site-specific recombination.” Ann Rev Biochem. 2006; 75: 567-605, the entire contents of which are incorporated by reference). The catalytic domains of these recombinases are thus amenable to being recombined with nuclease-inactivated RNA-programmable nucleases (e.g., dCas9, or a fragment thereof) as described herein, e.g., following the isolation of ‘activated’ recombinase mutants which do not require any accessory factors (e.g., DNA binding activities) (See, e.g., Klippel et al., “Isolation and characterisation of unusual gin mutants.” EMBO J. 1988; 7: 3983-3989: Burke et al., “Activating mutations of Tn3 resolvase marking interfaces important in recombination catalysis and its regulation. Mol Microbiol. 2004; 51: 937-948; Olorunniji et al., “Synapsis and catalysis by activated Tn3 resolvase mutants.” Nucleic Acids Res. 2008; 36: 7181-7191; Rowland et al., “Regulatory mutations in Sin recombinase support a structure-based model of the synaptosome.” Mol Microbiol. 2009; 74: 282-298; Akopian et al., “Chimeric recombinases with designed DNA sequence recognition.” Proc Natl Acad Sci USA. 2003; 100: 8688-8691). Additionally, many other natural serine recombinases having an N-terminal catalytic domain and a C-terminal DNA binding domain are known (e.g., phiC31 integrase, TnpX transposase, IS607 transposase), and their catalytic domains can be co-opted to engineer programmable site-specific recombinases as described herein (See, e.g., Smith et al., “Diversity in the serine recombinases.” Mol Microbiol. 2002; 44: 299-307, the entire contents of which are incorporated by reference). Similarly, the core catalytic domains of tyrosine recombinases (e.g., Cre, λ integrase) are known, and can be similarly co-opted to engineer programmable site-specific recombinases as described herein (See, e.g., Guo et al., “Structure of Cre recombinase complexed with DNA in a site-specific recombination synapse.” Nature. 1997; 389:40-46; Hartung et al., “Cre mutants with altered DNA binding properties.” J Biol Chem 1998; 273:22884-22891; Shaikh et al., “Chimeras of the Flp and Cre recombinases: Tests of the mode of cleavage by Flp and Cre. J Mol Biol. 2000; 302:27-48; Rongrong et al., “Effect of deletion mutation on the recombination activity of Cre recombinase.” Acta Biochim Pol. 2005; 52:541-544; Kilbride et al., “Determinants of product topology in a hybrid Cre-Tn3 resolvase site-specific recombination system.” J Mol Biol. 2006; 355:185-195; Warren et al., “A chimeric cre recombinase with regulated directionality.” Proc Natl Acad Sci USA. 2008 105:18278-18283; Van Duyne, “Teaching Cre to follow directions.” Proc Natl Acad Sci USA. 2009 Jan. 6; 106(1):4-5; Numrych et al., “A comparison of the effects of single-base and triple-base changes in the integrase arm-type binding sites on the site-specific recombination of bacteriophage λ.” Nucleic Acids Res. 1990; 18:3953-3959; Tirumalai et al., “The recognition of core-type DNA sites by λ integrase.” J Mol Biol. 1998; 279:513-527; Aihara et al., “A conformational switch controls the DNA cleavage activity of λ integrase.” Mol Cell. 2003; 12:187-198; Biswas et al., “A structural basis for allosteric control of DNA recombination by λ integrase.” Nature. 2005; 435:1059-1066; and Warren et al., “Mutations in the amino-terminal domain of λ-integrase have differential effects on integrative and excisive recombination.” Mol Microbiol. 2005; 55:1104-1112; the entire contents of each are incorporated by reference).

### Recombinase Recognition Sequence

[0262] The term “recombinase recognition sequence”, or equivalently as “RRS” or “recombinase target sequence”, as used herein, refers to a nucleotide sequence target recognized by a recombinase and which undergoes strand exchange with another DNA molecule having a the RRS that results in excision, integration, inversion, or exchange of DNA fragments between the recombinase recognition sequences.

### Recombine or Recombination

[0263] The term “recombine,” or “recombination,” in the context of a nucleic acid modification (e.g., a genomic modification), is used to refer to the process by which two or more nucleic acid molecules, or two or more regions of a single nucleic acid molecule, are modified by the action of a recombinase protein (e.g., an inventive recombinase fusion protein provided herein). Recombination can result in, inter alia, the insertion, inversion, excision, or translocation of nucleic acids, e.g., in or between one or more nucleic acid molecules. recombinase recognition sequences

### Reverse Transcriptase

[0264] The term “reverse transcriptase” describes a class of polymerases characterized as RNA-dependent DNA polymerases. All known reverse transcriptases require a primer to synthesize a DNA transcript from an RNA template. Historically, reverse transcriptase has been used primarily to transcribe mRNA into cDNA which can then be cloned into a vector for further manipulation. Avian myoblastosis virus (AMV) reverse transcriptase was the first widely used RNA-dependent DNA polymerase (Verma, Biochim. Biophys. Acta 473:1 (1977)). The enzyme has 5′-3′ RNA-directed DNA polymerase activity, 5′-3′ DNA-directed DNA polymerase activity, and RNase H activity. RNase H is a processive 5′ and 3′ ribonuclease specific for the RNA strand for RNA-DNA hybrids (Perbal, A Practical Guide to Molecular Cloning, New York: Wiley & Sons (1984)). Errors in transcription cannot be corrected by reverse transcriptase because known viral reverse transcriptases lack the 3′-5′ exonuclease activity necessary for proofreading (Saunders and Saunders, Microbial Genetics Applied to Biotechnology, London: Croom Helm (1987)). A detailed study of the activity of AMV reverse transcriptase and its associated RNase H activity has been presented by Berger et al., Biochemistry 22:2365-2372 (1983). Another reverse transcriptase which is used extensively in molecular biology is reverse transcriptase originating from Moloney murine leukemia virus (M-MLV). See, e.g., Gerard, G. R., DNA 5:271-279 (1986) and Kotewicz, M. L., et al., Gene 35:249-258 (1985). M-MLV reverse transcriptase substantially lacking in RNase H activity has also been described. See, e.g., U.S. Pat. No. 5,244,797. The invention contemplates the use of any such reverse transcriptases, or variants or mutants thereof.

[0265] In addition, the invention contemplates the use of reverse transcriptases which are error-prone, i.e., which may be referred to as error-prone reverse transcriptases or reverse transcriptases which do not support high fidelity incorporation of nucleotides during polymerization. During synthesis of the single-strand DNA flap based on the RT template integrated with the guide RNA, the error-prone reverse transcriptase can introduce one or more nucleotides which are mismatched with the RT template sequence, thereby introducing changes to the nucleotide sequence through erroneous polymerization of the single-strand DNA flap. These errors introduced during synthesis of the single strand DNA flap then become integrated into the double strand molecule through hybridization to the corresponding endogenous target strand, removal of the endogenous displaced strand, ligation, and then through one more round of endogenous DNA repair and/or sequencing processes.

### Reverse Transcription

[0266] As used herein, the term “reverse transcription” indicates the capability of enzyme to synthesize DNA strand (that is, complementary DNA or cDNA) using RNA as a template. In some embodiments, the reverse transcription can be “error-prone reverse transcription,” which refers to the properties of certain reverse transcriptase enzymes which are error-prone in their DNA polymerization activity.

### PACE

[0267] The term “phage-assisted continuous evolution (PACE),” as used herein, refers to continuous evolution that employs phage as viral vectors. The general concept of PACE technology has been described, for example, in International PCT Application, PCT/US2009/056194, filed Sep. 8, 2009, published as WO 2010/028347 on Mar. 11, 2010; International PCT Application, PCT/US2011/066747, filed Dec. 22, 2011, published as WO 2012/088381 on Jun. 28, 2012; U.S. Application, U.S. Pat. No. 9,023,594, issued May 5, 2015, International PCT Application, PCT/US2015/012022, filed Jan. 20, 2015, published as WO 2015/134121 on Sep. 11, 2015, and International PCT Application, PCT/US2016/027795, filed Apr. 15, 2016, published as WO 2016/168631 on Oct. 20, 2016, the entire contents of each of which are incorporated herein by reference.

### Phage

[0268] The term “phage,” as used herein interchangeably with the term “bacteriophage,” refers to a virus that infects bacterial cells. Typically, phages consist of an outer protein capsid enclosing genetic material. The genetic material can be ssRNA, dsRNA, ssDNA, or dsDNA, in either linear or circular form. Phages and phage vectors are well known to those of skill in the art and non-limiting examples of phages that are useful for carrying out the PACE methods provided herein are λ (Lysogen), T2, T4, T7, T12, R17, M13, MS2, G4, P1, P2, P4, Phi X174, N4, Φ6, and Φ29. In certain embodiments, the phage utilized in the present invention is M13. Additional suitable phages and host cells will be apparent to those of skill in the art and the invention is not limited in this aspect. For an exemplary description of additional suitable phages and host cells, see Elizabeth Kutter and Alexander Sulakvelidze: Bacteriophages: Biology and Applications. CRC Press; 1st edition (December 2004), ISBN: 0849313368; Martha R. J. Clokie and Andrew M. Kropinski: Bacteriophages: Methods and Protocols, Volume 1: Isolation, Characterization, and Interactions (Methods in Molecular Biology) Humana Press; 1st edition (December, 2008), ISBN: 1588296822; Martha R. J. Clokie and Andrew M. Kropinski: Bacteriophages: Methods and Protocols, Volume 2: Molecular and Applied Aspects (Methods in Molecular Biology) Humana Press; 1st edition (December 2008), ISBN: 1603275649; all of which are incorporated herein in their entirety by reference for disclosure of suitable phages and host cells as well as methods and protocols for isolation, culture, and manipulation of such phages).

### Protein, Peptide, and Polypeptide

[0269] The terms “protein,” “peptide,” and “polypeptide” are used interchangeably herein, and refer to a polymer of amino acid residues linked together by peptide (amide) bonds. The terms refer to a protein, peptide, or polypeptide of any size, structure, or function. Typically, a protein, peptide, or polypeptide will be at least three amino acids long. A protein, peptide, or polypeptide may refer to an individual protein or a collection of proteins. One or more of the amino acids in a protein, peptide, or polypeptide may be modified, for example, by the addition of a chemical entity such as a carbohydrate group, a hydroxyl group, a phosphate group, a farnesyl group, an isofarnesyl group, a fatty acid group, a linker for conjugation, functionalization, or other modification, etc. A protein, peptide, or polypeptide may also be a single molecule or may be a multi-molecular complex. A protein, peptide, or polypeptide may be just a fragment of a naturally occurring protein or peptide. A protein, peptide, or polypeptide may be naturally occurring, recombinant, or synthetic, or any combination thereof. Any of the proteins provided herein may be produced by any method known in the art. For example, the proteins provided herein may be produced via recombinant protein expression and purification, which is especially suited for fusion proteins comprising a peptide linker. Methods for recombinant protein expression and purification are well known, and include those described by Green and Sambrook, Molecular Cloning: A Laboratory Manual (4th ed., Cold Spring Harbor Laboratory Press, Cold Spring Harbor, N.Y. (2012)), the entire contents of which are incorporated herein by reference.

### Protein Splicing

[0270] The term “protein splicing,” as used herein, refers to a process in which a sequence, an intein (or split inteins, as the case may be), is excised from within an amino acid sequence, and the remaining fragments of the amino acid sequence, the exteins, are ligated via an amide bond to form a continuous amino acid sequence. The term “trans” protein splicing refers to the specific case where the inteins are split inteins and they are located on different proteins.

### Second-Strand Nicking

[0271] The resolution of heteroduplex DNA (i.e., containing one edited and one non-edited strand) formed as a result of prime editing determines long-term editing outcomes. In words, a goal of prime editing is to resolve the heteroduplex DNA (the edited strand paired with the endogenous non-edited strand) formed as an intermediate of PE by permanently integrating the edited strand into the complement, endogenous strand. The approach of “second-strand nicking” can be used herein to help drive the resolution of heteroduplex DNA in favor of permanent integration of the edited strand into the DNA molecule. As used herein, the concept of “second-strand nicking” refers to the introduction of a second nick at a location downstream of the first nick (i.e., the initial nick site that provides the free 3′ end for use in priming of the reverse transcriptase on the extended portion of the guide RNA), preferably on the unedited strand. In certain embodiments, the first nick and the second nick are on opposite strands. In other embodiments, the first nick and the second nick are on opposite strands. In yet another embodiment, the first nick is on the non-target strand (i.e., the strand that forms the single strand portion of the R-loop), and the second nick is on the target strand. In still other embodiments, the first nick is on the edited strand, and the second nick is on the unedited strand. The second nick can be positioned at least 5 nucleotides downstream of the first nick, or at least 6, 7, 8, 9, 10, 11, 12, 13, 14, 15, 16, 17, 18, 19, 20, 21, 22, 23, 24, 25, 26, 27, 28, 29, 30, 40, 50, 60, 70, 80, 90, 100, 110, 120, 130, 140, or 150 or more nucleotides downstream of the first nick. The second nick, in certain embodiments, can be introduced between about 5-150 nucleotides on the unedited strand away from the site of the PEgRNA-induced nick, or between about 5-140, or between about 5-130, or between about 5-120, or between about 5-110, or between about 5-100, or between about 5-90, or between about 5-80, or between about 5-70, or between about 5-60, or between about 5-50, or between about 5-40, or between about 5-30, or between about 5-20, or between about 5-10. In one embodiment, the second nick is introduced between 14-116 nucleotides away from the PEgRNA-induced nick. Without being bound by theory, the second nick induces the cell's endogenous DNA repair and replication processes towards replacement or editing of the unedited strand, thereby permanently installing the edited sequence on both strands and resolving the heteroduplex that is formed as a result of PE. In some embodiments, the edited strand is the non-target strand and the unedited strand is the target strand. In other embodiments, the edited strand is the target strand, and the unedited strand is the non-target strand.

### Sense Strand

[0272] In genetics, a “sense” strand is the segment within double-stranded DNA that runs from 5′ to 3′, and which is complementary to the antisense strand of DNA, or template strand, which runs from 3′ to 5′. In the case of a DNA segment that encodes a protein, the sense strand is the strand of DNA that has the same sequence as the mRNA, which takes the antisense strand as its template during transcription, and eventually undergoes (typically, not always) translation into a protein. The antisense strand is thus responsible for the RNA that is later translated to protein, while the sense strand possesses a nearly identical makeup to that of the mRNA. Note that for each segment of dsDNA, there will possibly be two sets of sense and antisense, depending on which direction one reads (since sense and antisense is relative to perspective). It is ultimately the gene product, or mRNA, that dictates which strand of one segment of dsDNA is referred to as sense or antisense.

[0273] In the context of a PEgRNA, the first step is the synthesis of a single-strand complementary DNA (i.e., the 3′ ssDNA flap, which becomes incorporated) oriented in the 5′ to 3′ direction which is templated off of the PEgRNA extension arm. Whether the 3′ ssDNA flap should be regarded as a sense or antisense strand depends on the direction of transcription since it well accepted that both strands of DNA may serve as a template for transcription (but not at the same time). Thus, in some embodiments, the 3′ ssDNA flap (which overall runs in the 5′ to 3′ direction) will serve as the sense strand because it is the coding strand. In other embodiments, the 3′ ssDNA flap (which overall runs in the 5′ to 3′ direction) will serve as the antisense strand and thus, the template for transcription.

### Spacer Sequence

[0274] As used herein, the term “spacer sequence” in connection with a guide RNA or a PEgRNA refers to the portion of the guide RNA or PEgRNA of about 20 nucleotides which contains a nucleotide sequence that is complementary to the protospacer sequence in the target DNA sequence. The spacer sequence anneals to the protospacer sequence to form a ssRNA/ssDNA hybrid structure at the target site and a corresponding R loop ssDNA structure of the endogenous DNA strand that is complementary to the protospacer sequence.

### Subject

[0275] The term “subject,” as used herein, refers to an individual organism, for example, an individual mammal. In some embodiments, the subject is a human. In some embodiments, the subject is a non-human mammal. In some embodiments, the subject is a non-human primate. In some embodiments, the subject is a rodent. In some embodiments, the subject is a sheep, a goat, a cattle, a cat, or a dog. In some embodiments, the subject is a vertebrate, an amphibian, a reptile, a fish, an insect, a fly, or a nematode. In some embodiments, the subject is a research animal. In some embodiments, the subject is genetically engineered, e.g., a genetically engineered non-human subject. The subject may be of either sex and at any stage of development.

### Split Intein

[0276] Although inteins are most frequently found as a contiguous domain, some exist in a naturally split form. In this case, the two fragments are expressed as separate polypeptides and must associate before splicing takes place, so-called protein trans-splicing.

[0277] An exemplary split intein is the Ssp DnaE intein, which comprises two subunits, namely, DnaE-N and DnaE-C. The two different subunits are encoded by separate genes, namely dnaE-n and dnaE-c, which encode the DnaE-N and DnaE-C subunits, respectively. DnaE is a naturally occurring split intein in Synechocytis sp. PCC6803 and is capable of directing trans-splicing of two separate proteins, each comprising a fusion with either DnaE-N or DnaE-C.

[0278] Additional naturally occurring or engineered split-intein sequences are known in the or can be made from whole-intein sequences described herein or those available in the art. Examples of split-intein sequences can be found in Stevens et al., “A promiscuous split intein with expanded protein engineering applications,” PNAS, 2017, Vol. 114: 8538-8543; Iwai et al., “Highly efficient protein trans-splicing by a naturally split DnaE intein from Nostc punctiforme, FEBS Lett, 580: 1853-1858, each of which are incorporated herein by reference. Additional split intein sequences can be found, for example, in WO 2013/045632, WO 2014/055782, WO 2016/069774, and EP2877490, the contents each of which are incorporated herein by reference.

[0279] In addition, protein splicing in trans has been described in vivo and in vitro (Shingledecker, et al., Gene 207:187 (1998), Southworth, et al., EMBO J. 17:918 (1998); Mills, et al., Proc. Natl. Acad. Sci. USA, 95:3543-3548 (1998); Lew, et al., J. Biol. Chem., 273:15887-15890 (1998); Wu, et al., Biochim. Biophys. Acta 35732:1 (1998b), Yamazaki, et al., J. Am. Chem. Soc. 120:5591 (1998), Evans, et al., J. Biol. Chem. 275:9091 (2000); Otomo, et al., Biochemistry 38:16040-16044 (1999); Otomo, et al., J. Biolmol. NMR 14:105-114 (1999); Scott, et al., Proc. Natl. Acad. Sci. USA 96:13638-13643 (1999)) and provides the opportunity to express a protein as to two inactive fragments that subsequently undergo ligation to form a functional product, e.g., as shown in FIGS. 66 and 67 with regard to the formation of a complete PE fusion protein from two separately-expressed halves.

### Target Site

[0280] The term “target site” refers to a sequence within a nucleic acid molecule that is edited by a prime editor (PE) disclosed herein. The target site further refers to the sequence within a nucleic acid molecule to which a complex of the prime editor (PE) and gRNA binds.

tPERT

[0281] See definition for “trans prime editor RNA template (tPERT).”

### Temporal Second-Strand Nicking

[0282] As used herein, the term “temporal second-strand nicking” refers to a variant of second strand nicking whereby the installation of the second nick in the unedited strand occurs only after the desired edit is installed in the edited strand. This avoids concurrent nicks on both strands that could lead to double-stranded DNA breaks. The second-strand nicking guide RNA is designed for temporal control such that the second strand nick is not introduced until after the installation of the desired edit. This is achieved by designing a gRNA with a spacer sequence that matches only the edited strand, but not the original allele. Using this strategy, mismatches between the protospacer and the unedited allele should disfavor nicking by the sgRNA until after the editing event on the PAM strand takes place.

### Trans Prime Editing

[0283] As used herein, the term “trans prime editing” refers to a modified form of prime editing that utilizes a split PEgRNA, i.e., wherein the PEgRNA is separated into two separate molecules: an sgRNA and a trans prime editing RNA template (tPERT). The sgRNA serves to target the prime editor (or more generally, to target the napDNAbp component of the prime editor) to the desired genomic target site, while the tPERT is used by the polymerase (e.g., a reverse transcriptase) to write new DNA sequence into the target locus once the tPERT is recruited in trans to the prime editor by the interaction of binding domains located on the prime editor and on the tPERT. In one embodiment, the binding domains can include RNA-protein recruitment moieties, such as a MS2 aptamer located on the tPERT and an MS2cp protein fused to the prime editor. An advantage of trans prime editing is that by separating the DNA synthesis template from the guide RNA, one can potentially use longer length templates.

[0284] An embodiment of trans prime editing is shown in FIGS. 3G and 3H. FIG. 3G shows the composition of the trans prime editor complex on the left (“RP-PE:gRNA complex), which comprises an napDNAbp fused to each of a polymerase (e.g., a reverse transcriptase) and a rPERT recruiting protein (e.g., MS2sc), and which is complexed with a guide RNA. FIG. 3G further shows a separate tPERT molecule, which comprises the extension arm features of a PEgRNA, including the DNA synthesis template and the primer binding sequence. The tPERT molecule also includes an RNA-protein recruitment domain (which, in this case, is a stem loop structure and can be, for example, MS2 aptamer). As depicted in the process described in FIG. 3H, the RP-PE:gRNA complex binds to and nicks the target DNA sequence. Then, the recruiting protein (RP) recruits a tPERT to co-localize to the prime editor complex bound to the DNA target site, thereby allowing the primer binding site to bind to the primer sequence on the nicked strand, and subsequently, allowing the polymerase (e.g., RT) to synthesize a single strand of DNA against the DNA synthesis template up through the 5′ of the tPERT.

[0285] While the tPERT is shown in FIG. 3G and FIG. 3H as comprising the PBS and DNA synthesis template on the 5′ end of the RNA-protein recruitment domain, the tPERT in other configurations may be designed with the PBS and DNA synthesis template located on the 3′ end of the RNA-protein recruitment domain. However, the tPERT with the 5′ extension has the advantage that synthesis of the single strand of DNA will naturally terminate at the 5′ end of the tPERT and thus, does not risk using any portion of the RNA-protein recruitment domain as a template during the DNA synthesis stage of prime editing.

Trans Prime Editor RNA Template (tPERT)

[0286] As used herein, a “trans prime editor RNA template (tPERT)” refers to a component used in trans prime editing, a modified version of prime editing which operates by separating the PEgRNA into two distinct molecules: a guide RNA and a tPERT molecule. The tPERT molecule is programmed to co-localize with the prime editor complex at a target DNA site, bringing the primer binding site and the DNA synthesis template to the prime editor in trans. For example, see FIG. 3G for an embodiment of a trans prime editor (tPE) which shows a two-component system comprising (1) an RP-PE:gRNA complex and (2) a tPERT that includes the primer binding site and the DNA synthesis template joined to an RNA-protein recruitment domain, wherein the RP (recruiting protein) component of the RP-PE:gRNA complex recruits the tPERT to a target site to be edited, thereby associating the PBS and DNA synthesis template with the prime editor in trans. Said another way, the tPERT is engineered to contain (all or part of) the extension arm of a PEgRNA, which includes the primer binding site and the DNA synthesis template.

### Transitions

[0287] As used herein, “transitions” refer to the interchange of purine nucleobases (A↔G) or the interchange of pyrimidine nucleobases (C↔T). This class of interchanges involves nucleobases of similar shape. The compositions and methods disclosed herein are capable of inducing one or more transitions in a target DNA molecule. The compositions and methods disclosed herein are also capable of inducing both transitions and transversion in the same target DNA molecule. These changes involve A↔G, G↔A, C↔T, or T↔C. In the context of a double-strand DNA with Watson-Crick paired nucleobases, transversions refer to the following base pair exchanges: A:T↔G:C, G:G↔A:T, C:G↔T:A, or T:A↔C:G. The compositions and methods disclosed herein are capable of inducing one or more transitions in a target DNA molecule. The compositions and methods disclosed herein are also capable of inducing both transitions and transversion in the same target DNA molecule, as well as other nucleotide changes, including deletions and insertions.

### Transversions

[0288] As used herein, “transversions” refer to the interchange of purine nucleobases for pyrimidine nucleobases, or in the reverse and thus, involve the interchange of nucleobases with dissimilar shape. These changes involve T↔A, T↔G, C↔G, C↔A, A↔T, A↔C, G↔C, and G↔T. In the context of a double-strand DNA with Watson-Crick paired nucleobases, transversions refer to the following base pair exchanges: T:A↔A:T, T:A↔G:C, C:G↔G:C, C:G↔A:T, A:T↔T:A, A:T↔C:G, G:C↔C:G, and G:C↔T:A. The compositions and methods disclosed herein are capable of inducing one or more transversions in a target DNA molecule. The compositions and methods disclosed herein are also capable of inducing both transitions and transversion in the same target DNA molecule, as well as other nucleotide changes, including deletions and insertions.

### Treatment

[0289] The terms “treatment,” “treat,” and “treating,” refer to a clinical intervention aimed to reverse, alleviate, delay the onset of, or inhibit the progress of a disease or disorder, or one or more symptoms thereof, as described herein. As used herein, the terms “treatment,” “treat,” and “treating” refer to a clinical intervention aimed to reverse, alleviate, delay the onset of, or inhibit the progress of a disease or disorder, or one or more symptoms thereof, as described herein. In some embodiments, treatment may be administered after one or more symptoms have developed and/or after a disease has been diagnosed. In other embodiments, treatment may be administered in the absence of symptoms, e.g., to prevent or delay onset of a symptom or inhibit onset or progression of a disease. For example, treatment may be administered to a susceptible individual prior to the onset of symptoms (e.g., in light of a history of symptoms and/or in light of genetic or other susceptibility factors). Treatment may also be continued after symptoms have resolved, for example, to prevent or delay their recurrence.

### Trinucleotide Repeat Disorder

[0290] As used herein, a “trinucleotide repeat disorder” (or alternatively, “expansion repeat disorder” or “repeat expansion disorder”) refers to a set of genetic disorders which are cause by “trinucleotide repeat expansion,” which is a kind of mutation where a certain trinucleotide repeats in certain genes or introns. Trinucleotide repeats were once thought to be commonplace iterations in the genome, but the 1990s clarified these disorders. These apparently ‘benign’ stretches of DNA can sometimes expand and cause disease. Several defining features are shared amongst disorders caused by trinucleotide repeat expansions. First, the mutant repeats show both somatic and germline instability and, more frequently, they expand rather than contract in successive transmissions. Secondly, an earlier age of onset and increasing severity of phenotype in subsequent generations (anticipation) generally are correlated with larger repeat length. Finally, the parental origin of the disease allele can often influence anticipation, with paternal transmissions carrying a greater risk of expansion for many of these disorders.

[0291] Triplet expansion is thought to be caused by slippage during DNA replication. Due to the repetitive nature of the DNA sequence in these regions ‘loop out’ structures may form during DNA replication while maintaining complementary base pairing between the parent strand and daughter strand being synthesized. If the loop out structure is formed from sequence on the daughter strand this will result in an increase in the number of repeats. However, if the loop out structure is formed on the parent strand a decrease in the number of repeats occurs. It appears that expansion of these repeats is more common than reduction. Generally the larger the expansion the more likely they are to cause disease or increase the severity of disease. This property results in the characteristic of anticipation seen in trinucleotide repeat disorders. Anticipation describes the tendency of age of onset to decrease and severity of symptoms to increase through successive generations of an affected family due to the expansion of these repeats.

[0292] Nucleotide repeat disorders may include those in which the triplet repeat occurs in a non-coding region (i.e., a non-coding trinucleotide repeat disorder) or in a coding region

[0293] The prime editor (PE) system described herein may use to treat nucleotide repeat disorders, which may include fragile X syndrome (FRAXA), fragile XE MR (FRAXE), Freidreich ataxia (FRDA), myotonic dystrophy (DM), spinocerebellar ataxia type 8 (SCAB), and spinocerebellar ataxia type 12 (SCA12), among others.

### Upstream

[0294] As used herein, the terms “upstream” and “downstream” are terms of relativity that define the linear position of at least two elements located in a nucleic acid molecule (whether single or double-stranded) that is orientated in a 5′-to-3′ direction. In particular, a first element is upstream of a second element in a nucleic acid molecule where the first element is positioned somewhere that is 5′ to the second element. For example, a SNP is upstream of a Cas9-induced nick site if the SNP is on the 5′ side of the nick site. Conversely, a first element is downstream of a second element in a nucleic acid molecule where the first element is positioned somewhere that is 3′ to the second element. For example, a SNP is downstream of a Cas9-induced nick site if the SNP is on the 3′ side of the nick site. The nucleic acid molecule can be a DNA (double or single stranded). RNA (double or single stranded), or a hybrid of DNA and RNA. The analysis is the same for single strand nucleic acid molecule and a double strand molecule since the terms upstream and downstream are in reference to only a single strand of a nucleic acid molecule, except that one needs to select which strand of the double stranded molecule is being considered. Often, the strand of a double stranded DNA which can be used to determine the positional relativity of at least two elements is the “sense” or “coding” strand. In genetics, a “sense” strand is the segment within double-stranded DNA that runs from 5′ to 3′, and which is complementary to the antisense strand of DNA, or template strand, which runs from 3′ to 5′. Thus, as an example, a SNP nucleobase is “downstream” of a promoter sequence in a genomic DNA (which is double-stranded) if the SNP nucleobase is on the 3′ side of the promoter on the sense or coding strand.

### Variant

[0295] As used herein the term “variant” should be taken to mean the exhibition of qualities that have a pattern that deviates from what occurs in nature, e.g., a variant Cas9 is a Cas9 comprising one or more changes in amino acid residues as compared to a wild type Cas9 amino acid sequence. The term “variant” encompasses homologous proteins having at least 75%, or at least 80%, or at least 85%, or at least 90%, or at least 95%, or at least 99% percent identity with a reference sequence and having the same or substantially the same functional activity or activities as the reference sequence. The term also encompasses mutants, truncations, or domains of a reference sequence, and which display the same or substantially the same functional activity or activities as the reference sequence.

### Vector

[0296] The term “vector,” as used herein, refers to a nucleic acid that can be modified to encode a gene of interest and that is able to enter into a host cell, mutate and replicate within the host cell, and then transfer a replicated form of the vector into another host cell. Exemplary suitable vectors include viral vectors, such as retroviral vectors or bacteriophages and filamentous phage, and conjugative plasmids. Additional suitable vectors will be apparent to those of skill in the art based on the instant disclosure.

### Wild Type

[0297] As used herein the term “wild type” is a term of the art understood by skilled persons and means the typical form of an organism, strain, gene or characteristic as it occurs in nature as distinguished from mutant or variant forms.

### 5′ Endogenous DNA Flap

[0298] As used herein, the term “5′ endogenous DNA flap” refers to the strand of DNA situated immediately downstream of the PE-induced nick site in the target DNA. The nicking of the target DNA strand by PE exposes a 3′ hydroxyl group on the upstream side of the nick site and a 5′ hydroxyl group on the downstream side of the nick site. The endogenous strand ending in the 3′ hydroxyl group is used to prime the DNA polymerase of the prime editor (e.g., wherein the DNA polymerase is a reverse transcriptase). The endogenous strand on the downstream side of the nick site and which begins with the exposed 5′ hydroxyl group is referred to as the “5′ endogenous DNA flap” and is ultimately removed and replaced by the newly synthesized replacement strand (i.e., “3′ replacement DNA flap”) the encoded by the extension of the PEgRNA.

### 5′ Endogenous DNA Flap Removal

[0299] As used herein, the term “5′ endogenous DNA flap removal” or “5′ flap removal” refers to the removal of the 5′ endogenous DNA flap that forms when the RT-synthesized single-strand DNA flap competitively invades and hybridizes to the endogenous DNA, displacing the endogenous strand in the process. Removing this endogenous displaced strand can drive the reaction towards the formation of the desired product comprising the desired nucleotide change. The cell's own DNA repair enzymes may catalyze the removal or excision of the 5′ endogenous flap (e.g., a flap endonuclease, such as EXO1 or FEN1). Also, host cells may be transformed to express one or more enzymes that catalyze the removal of said 5′ endogenous flaps, thereby driving the process toward product formation (e.g., a flap endonuclease). Flap endonucleases are known in the art and can be found described in Patel et al., “Flap endonucleases pass 5′-flaps through a flexible arch using a disorder-thread-order mechanism to confer specificity for free 5′-ends,” Nucleic Acids Research, 2012, 40(10): 4507-4519 and Tsutakawa et al., “Human flap endonuclease structures, DNA double-base flipping, and a unified understanding of the FEN1 superfamily,” Cell, 2011, 145(2): 198-211 (each of which are incorporated herein by reference).

### 3′ Replacement DNA Flap

[0300] As used herein, the term “3′ replacement DNA flap” or simply, “replacement DNA flap,” refers to the strand of DNA that is synthesized by the prime editor and which is encoded by the extension arm of the prime editor PEgRNA. More in particular, the 3′ replacement DNA flap is encoded by the polymerase template of the PEgRNA. The 3′ replacement DNA flap comprises the same sequence as the 5′ endogenous DNA flap except that it also contains the edited sequence (e.g., single nucleotide change). The 3′ replacement DNA flap anneals to the target DNA, displacing or replacing the 5′ endogenous DNA flap (which can be excised, for example, by a 5′ flap endonuclease, such as FEN1 or EXO1) and then is ligated to join the 3′ end of the 3′ replacement DNA flap to the exposed 5′ hydoxyl end of endogenous DNA (exposed after excision of the 5′ endogenous DNA flap, thereby reforming a phosophodiester bond and installing the 3′ replacement DNA flap to form a heteroduplex DNA containing one edited strand and one unedited strand. DNA repair processes resolve the heteroduplex by copying the information in the edited strand to the complementary strand permanently installs the edit in to the DNA. This resolution process can be driven further to completion by nicking the unedited strand, i.e., by way of “second-strand nicking,” as described herein.

### DETAILED DESCRIPTION OF CERTAIN EMBODIMENTS

[0301] Adoption of the clustered regularly interspaced short palindromic repeat (CRISPR) system for genome editing has revolutionized the life sciences¹⁻³. Although gene disruption using CRISPR is now routine, the precise installation of single nucleotide edits remains a major challenge, despite being necessary for studying or correcting a large number of disease-causative mutations. Homology directed repair (HDR) is capable of achieving such edits, but suffers from low efficiency (often <5%), a requirement for donor DNA repair templates, and deleterious effects of double-stranded DNA break (DSB) formation. Recently, Prof. David Liu et al.'s laboratory developed base editing, which achieves efficient single nucleotide editing without DSBs. Base editors (BEs) combine the CRISPR system with base-modifying deaminase enzymes to convert target C●G or A●T base pairs to A●T or G●C, respectively⁴⁻⁶. Although already widely used by researchers worldwide, current BEs enable only four of the twelve possible base pair conversions and are unable to correct small insertions or deletions. Moreover, the targeting scope of base editing is limited by the editing of non-target C or A bases adjacent to the target base (“bystander editing”) and by the requirement that a PAM sequence exist 15±2 bp from the target base. Overcoming these limitations would therefore greatly broaden the basic research and therapeutic applications of genome editing.

[0302] The present disclosure proposes a new precision editing approach that offers many of the benefits of base editing—namely, avoidance of double strand breaks and donor DNA repair templates—while overcoming its major limitations. The proposed approach described herein achieves the direct installation of edited DNA strands at target genomic sites using target-primed reverse transcription (TPRT). In the design discussed herein, CRISPR guide RNA (gRNA) will be engineered to carry a reverse transcriptase (RT) template sequence encoding a single-stranded DNA comprising a desired nucleotide change. The CRISPR nuclease (Cas9)-nicked target site DNA will serve as the primer for reverse transcription of the template sequence on the modified gRNA, allowing for direct incorporation of any desired nucleotide edit.

[0303] Accordingly, the present invention relates in part to the discovery that the mechanism of target-primed reverse transcription (TPRT) can be leveraged or adapted for conducting precision CRISPR/Cas-based genome editing with high efficiency and genetic flexibility (e.g., as depicted in various embodiments of FIGS. 1A-1F). The inventors have proposed herein to use Cas protein-reverse transcriptase fusions to target a specific DNA sequence with a modified guide RNA (“an extended guide RNA”), generate a single strand nick at the target site, and use the nicked DNA as a primer for reverse transcription of an engineered reverse transcriptase template that is integrated into the extended guide RNA. The newly synthesized strand would be homologous to the genomic target sequence except for the inclusion of a desired nucleotide change (e.g., a single nucleotide change, a deletion, or an insertion, or a combination thereof). The newly synthesize strand of DNA may be referred to as a single strand DNA flap, which would compete for hybridization with the complementary homologous endogenous DNA strand, thereby displacing the corresponding endogenous strand. Resolution of this hybridized intermediate can include removal of the resulting displaced flap of endogenous DNA (e.g., with a 5′ end DNA flap endonuclease, FEN1), ligation of the synthesized single strand DNA flap to the target DNA, and assimilation of the desired nucleotide change as a result of cellular DNA repair and/or replication processes. Because templated DNA synthesis offers single nucleotide precision, the scope of this approach is very broad and could foreseeably be used for myriad applications in basic science and therapeutics.

[1] napDNAbp

[0304] The prime editors and trans prime editors described herein may comprise a nucleic acid programmable DNA binding protein (napDNAbp).

[0305] In one aspect, a napDNAbp can be associated with or complexed with at least one guide nucleic acid (e.g., guide RNA or a PEgRNA), which localizes the napDNAbp to a DNA sequence that comprises a DNA strand (i.e., a target strand) that is complementary to the guide nucleic acid, or a portion thereof (e.g., the spacer of a guide RNA which anneals to the protospacer of the DNA target). In other words, the guide nucleic-acid “programs” the napDNAbp (e.g., Cas9 or equivalent) to localize and bind to complementary sequence of the protospacer in the DNA.

[0306] Any suitable napDNAbp may be used in the prime editors described herein. In various embodiments, the napDNAbp may be any Class 2 CRISPR-Cas system, including any type II, type V, or type VI CRISPR-Cas enzyme. Given the rapid development of CRISPR-Cas as a tool for genome editing, there have been constant developments in the nomenclature used to describe and/or identify CRISPR-Cas enzymes, such as Cas9 and Cas9 orthologs. This application references CRISPR-Cas enzymes with nomenclature that may be old and/or new. The skilled person will be able to identify the specific CRISPR-Cas enzyme being referenced in this Application based on the nomenclature that is used, whether it is old (i.e., “legacy”) or new nomenclature. CRISPR-Cas nomenclature is extensively discussed in Makarova et al., “Classification and Nomenclature of CRISPR-Cas Systems: Where from Here?,” The CRISPR Journal, Vol. 1. No. 5, 2018, the entire contents of which are incorporated herein by reference. The particular CRISPR-Cas nomenclature used in any given instance in this Application is not limiting in any way and the skilled person will be able to identify which CRISPR-Cas enzyme is being referenced.

[0307] For example, the following type II, type V, and type VI Class 2 CRISPR-Cas enzymes have the following art-recognized old (i.e., legacy) and new names. Each of these enzymes, and/or variants thereof, may be used with the prime editors described herein:

| | |
|---|---|
| Legacy nomenclature | Current nomenclature* |

type II CRISPR-Cas enzymes

| | |
|---|---|
| Cas9 | same |

type V CRISPR-Cas enzymes

| | |
|---|---|
| Cpf1 | Cas12a |
| CasX | Cas12e |
| C2c1 | Cas12b1 |
| Cas12b2 | same |
| C2c3 | Cas12c |
| CasY | Cas12d |
| C2c4 | same |
| C2c8 | same |
| C2c5 | same |
| C2c10 | same |
| C2c9 | same |

type VI CRISPR-Cas enzymes

| | |
|---|---|
| C2c2 | Cas13a |
| Cas13d | same |
| C2c7 | Cas13c |
| C2c6 | Cas136 |

*See Makarova et al., The CRISPR Journal, Vol. 1, No. 5, 2018

[0308] Without being bound by theory, the mechanism of action of certain napDNAbp contemplated herein includes the step of forming an R-loop whereby the napDNAbp induces the unwinding of a double-strand DNA target, thereby separating the strands in the region bound by the napDNAbp. The guide RNA spacer then hybridizes to the “target strand” at the protospacer sequence. This displaces a “non-target strand” that is complementary to the target strand, which forms the single strand region of the R-loop. In some embodiments, the napDNAbp includes one or more nuclease activities, which then cut the DNA leaving various types of lesions. For example, the napDNAbp may comprises a nuclease activity that cuts the non-target strand at a first location, and/or cuts the target strand at a second location. Depending on the nuclease activity, the target DNA can be cut to form a “double-stranded break” whereby both strands are cut. In other embodiments, the target DNA can be cut at only a single site, i.e., the DNA is “nicked” on one strand. Exemplary napDNAbp with different nuclease activities include “Cas9 nickase” (“nCas9”) and a deactivated Cas9 having no nuclease activities (“dead Cas9” or “dCas9”).

[0309] The below description of various napDNAbps which can be used in connection with the presently disclose prime editors is not meant to be limiting in any way. The prime editors may comprise the canonical SpCas9, or any ortholog Cas9 protein, or any variant Cas9 protein—including any naturally occurring variant, mutant, or otherwise engineered version of Cas9—that is known or which can be made or evolved through a directed evolutionary or otherwise mutagenic process. In various embodiments, the Cas9 or Cas9 variants have a nickase activity, i.e., only cleave of strand of the target DNA sequence. In other embodiments, the Cas9 or Cas9 variants have inactive nucleases, i.e., are “dead” Cas9 proteins. Other variant Cas9 proteins that may be used are those having a smaller molecular weight than the canonical SpCas9 (e.g., for easier delivery) or having modified or rearranged primary amino acid structure (e.g., the circular permutant formats).

[0310] The prime editors described herein may also comprise Cas9 equivalents, including Cas12a (Cpf1) and Cas12b1 proteins which are the result of convergent evolution. The napDNAbps used herein (e.g., SpCas9, Cas9 variant, or Cas9 equivalents) may also may also contain various modifications that alter/enhance their PAM specifities. Lastly, the application contemplates any Cas9, Cas9 variant, or Cas9 equivalent which has at least 70%, at least 75%, at least 80%, at least 85%, at least 90%, at least 91%, at least 92%, at least 93%, at least 94%, at least 95%, at least 96%, at least 97%, at least 98%, at least 99%, or at least 99.9% sequence identity to a reference Cas9 sequence, such as a references SpCas9 canonical sequence or a reference Cas9 equivalent (e.g., Cas12a (Cpf1)).

[0311] The napDNAbp can be a CRISPR (clustered regularly interspaced short palindromic repeat)-associated nuclease. As outlined above, CRISPR is an adaptive immune system that provides protection against mobile genetic elements (viruses, transposable elements and conjugative plasmids). CRISPR clusters contain spacers, sequences complementary to antecedent mobile elements, and target invading nucleic acids. CRISPR clusters are transcribed and processed into CRISPR RNA (crRNA). In type II CRISPR systems correct processing of pre-crRNA requires a trans-encoded small RNA (tracrRNA), endogenous ribonuclease 3 (rnc) and a Cas9 protein. The tracrRNA serves as a guide for ribonuclease 3-aided processing of pre-crRNA. Subsequently, Cas9/crRNA/tracrRNA endonucleolytically cleaves linear or circular dsDNA target complementary to the spacer. The target strand not complementary to crRNA is first cut endonucleolytically, then trimmed 3′-5′ exonucleolytically. In nature, DNA-binding and cleavage typically requires protein and both RNAs. However, single guide RNAs (“sgRNA”, or simply “gRNA”) can be engineered so as to incorporate aspects of both the crRNA and tracrRNA into a single RNA species. See, e.g., Jinek M. et al., Science 337:816-821(2012), the entire contents of which is hereby incorporated by reference.

[0312] In some embodiments, the napDNAbp directs cleavage of one or both strands at the location of a target sequence, such as within the target sequence and/or within the complement of the target sequence. In some embodiments, the napDNAbp directs cleavage of one or both strands within about 1, 2, 3, 4, 5, 6, 7, 8, 9, 10, 15, 20, 25, 50, 100, 200, 500, or more base pairs from the first or last nucleotide of a target sequence. In some embodiments, a vector encodes a napDNAbp that is mutated to with respect to a corresponding wild-type enzyme such that the mutated napDNAbp lacks the ability to cleave one or both strands of a target polynucleotide containing a target sequence. For example, an aspartate-to-alanine substitution (D10A) in the RuvC I catalytic domain of Cas9 from S. pyogenes converts Cas9 from a nuclease that cleaves both strands to a nickase (cleaves a single strand). Other examples of mutations that render Cas9 a nickase include, without limitation, H840A, N854A, and N863A in reference to the canonical SpCas9 sequence, or to equivalent amino acid positions in other Cas9 variants or Cas9 equivalents.

[0313] As used herein, the term “Cas protein” refers to a full-length Cas protein obtained from nature, a recombinant Cas protein having a sequences that differs from a naturally occurring Cas protein, or any fragment of a Cas protein that nevertheless retains all or a significant amount of the requisite basic functions needed for the disclosed methods, i.e., (i) possession of nucleic-acid programmable binding of the Cas protein to a target DNA, and (ii) ability to nick the target DNA sequence on one strand. The Cas proteins contemplated herein embrace CRISPR Cas 9 proteins, as well as Cas9 equivalents, variants (e.g., Cas9 nickase (nCas9) or nuclease inactive Cas9 (dCas9)) homologs, orthologs, or paralogs, whether naturally occurring or non-naturally occurring (e.g., engineered or recombinant), and may include a Cas9 equivalent from anyClass 2 CRISPR system (e.g., type II, V, VI), including Cas12a (Cpf1), Cas12e (CasX), Cas12b1 (C2c1), Cas12b2, Cas12c (C2c3), C2c4, C2c8, C2c5, C2c10, C2c9 Cas13a (C2c2), Cas13d, Cas13c (C2c7), Cas13b (C2c6), and Cas13b. Further Cas-equivalents are described in Makarova et al., “C2c2 is a single-component programmable RNA-guided RNA-targeting CRISPR effector,” Science 2016; 353(6299) and Makarova et al., “Classification and Nomenclature of CRISPR-Cas Systems: Where from Here?,” The CRISPR Journal, Vol. 1. No. 5, 2018, the contents of which are incorporated herein by reference.

[0314] The terms “Cas9” or “Cas9 nuclease” or “Cas9 moiety” or “Cas9 domain” embrace any naturally occurring Cas9 from any organism, any naturally-occurring Cas9 equivalent or functional fragment thereof, any Cas9 homolog, ortholog, or paralog from any organism, and any mutant or variant of a Cas9, naturally-occurring or engineered. The term Cas9 is not meant to be particularly limiting and may be referred to as a “Cas9 or equivalent.” Exemplary Cas9 proteins are further described herein and/or are described in the art and are incorporated herein by reference. The present disclosure is unlimited with regard to the particular Cas9 that is employed in the prime editor (PE) of the invention.

[0315] As noted herein, Cas9 nuclease sequences and structures are well known to those of skill in the art (see, e.g., “Complete genome sequence of an M1 strain of Streptococcus pyogenes.” Ferretti et al., J. J., McShan W. M., Ajdic D. J., Savic D. J., Savic G., Lyon K., Primeaux C., Sezate S., Suvorov A. N., Kenton S., Lai H. S., Lin S. P., Qian Y., Jia H. G., Najar F. Z., Ren Q., Zhu H., Song L., White J., Yuan X., Clifton S. W., Roe B. A., McLaughlin R. E., Proc. Natl. Acad. Sci. U.S.A. 98:4658-4663(2001); “CRISPR RNA maturation by trans-encoded small RNA and host factor RNase III.” Deltcheva E., Chylinski K., Sharma C. M., Gonzales K., Chao Y., Pirzada Z. A., Eckert M. R., Vogel J., Charpentier E., Nature 471:602-607(2011); and “A programmable dual-RNA-guided DNA endonuclease in adaptive bacterial immunity.” Jinek M., Chylinski K., Fonfara I., Hauer M., Doudna J. A., Charpentier E. Science 337:816-821(2012), the entire contents of each of which are incorporated herein by reference).

[0316] Examples of Cas9 and Cas9 equivalents are provided as follows; however, these specific examples are not meant to be limiting. The primer editor of the present disclosure may use any suitable napDNAbp, including any suitable Cas9 or Cas9 equivalent.

[0317] A. Wild Type Canonical SpCas9

[0318] In one embodiment, the primer editor constructs described herein may comprise the “canonical SpCas9” nuclease from S. pyogenes, which has been widely used as a tool for genome engineering and is categorized as the type II subgroup of enzymes of the Class 2 CRISPR-Cas systems. This Cas9 protein is a large, multi-domain protein containing two distinct nuclease domains. Point mutations can be introduced into Cas9 to abolish one or both nuclease activities, resulting in a nickase Cas9 (nCas9) or dead Cas9 (dCas9), respectively, that still retains its ability to bind DNA in a sgRNA-programmed manner. In principle, when fused to another protein or domain, Cas9 or variant thereof (e.g., nCas9) can target that protein to virtually any DNA sequence simply by co-expression with an appropriate sgRNA. As used herein, the canonical SpCas9 protein refers to the wild type protein from Streptococcus pyogenes having the following amino acid sequence:

| Description | Sequence | SEQ ID NO: |
|---|---|---|
| SpCas9 | MDKKYSIGLDIGTNSVGWAVITDEYKVPSKKFKVLGN | SEQ ID NO: 18 |
| Streptococcus | TDRHSIKKNLIGALLFDSGETAEATRLKRTARRRYTRR | |
| pyogenes | KNRICYLQEIFSNEMAKVDDSFFHRLEESFLVEEDKKH | |
| M1 | ERHPIFGNIVDEVAYHEKYPTIYHLRKKLVDSTDKADL | |
| SwissProt | RLIYLALAHMIKFRGHFLIEGDLNPDNSDVDKLFIQLVQ | |
| Accession | TYNQLFEENPINASGVDAKAILSARLSKSRRLENLIAQL | |
| No. | PGEKKNGLFGNLIALSLGLTPNFKSNFDLAEDAKLQLS | |
| Q99ZW2 | KDTYDDDLDNLLAQIGDQYADLFLAAKNLSDAILLSDI | |
| Wild type | LRVNTEITKAPLSASMIKRYDEHHQDLTLLKALVRQQL | |
| | PEKYKEIFFDQSKNGYAGYIDGGASQEEFYKFIKPILEK | |
| | MDGTEELLVKLNREDLLRKQRTFDNGSIPHQIHLGELH | |
| | AILRRQEDFYPFLKDNREKIEKILTFRIPYYVGPLARGN | |
| | SRFAWMTRKSEETITPWNFEEVVDKGASAQSFIERMTN | |
| | FDKNLPNEKVLPKHSLLYEYFTVYNELTKVKYVTEGM | |
| | RKPAFLSGEQKKAIVDLLFKTNRKVTVKQLKEDYFKKI | |
| | ECFDSVETSGVEDRFNASLGTYHDLLKIIKDKDFLDNEE | |
| | NEDILEDIVLTLTLFEDREMIEERLKTYAHLFDDKVMK | |
| | QLKRRRYTGWGRLSRKLINGIRDKQSGKTILDFLKSDG | |
| | FANRNFMQLIHDDSLTFKEDIQKAQVSGQGDSLHEHIA | |
| | NLAGSPAIKKGILQTVKVVDELVKVMGRHKPENIVIEM | |
| | ARENQTTQKGQKNSRERMKRIEEGIKELGSQILKEHPV | |
| | ENTQLQNEKLYLYYLQNGRDMYVDQELDINRLSDYD | |
| | VDHIVPQSFLKDDSIDNKVLTRSDKNRGKSDNVPSEEV | |
| | VKKMKNYWRQLLNAKLITQRKFDNLTKAERGGLSEL | |
| | DKAGFIKRQLVETRQITKHVAQILDSRMNTKYDENDK | |
| | LIREVKVITLKSKLVSDFRKDFQFYKVREINNYHHAHD | |
| | AYLNAVVGTALIKKYPKLESEFVYGDYKVYDVRKMIA | |
| | KSEQEIGKATAKYFFYSNIMNFFKTEITLANGEIRKRPLI | |
| | ETNGETGEIVWDKGRDFATVRKVLSMPQVNIVKKTEV | |
| | QTGGFSKESILPKRNSDKLIARKKDWDPKKYGGFDSPT | |
| | VAYSVLVVAKVEKGKSKKLKSVKELLGITIMERSSFEK | |
| | NPlDFLEAKGYKEVKKDLIIKLPKYSLFELENGRKRML | |
| | ASAGELQKGNELALPSKYVNFLYLASHYEKLKGSPED | |
| | NEQKQLFVEQHKHYLDEIIEQISEFSKRVILADANLDKV | |
| | LSAYNKHRDKPIREQAENIIHLFTLTNLGAPAAFKYFDT | |
| | TIDRKRYTSTKEVLDATLIHQSITGLYETRIDLSQLGGD | |
| SpCas9 | ATGGATAAAAAATATAGCATTGGCCTGGATATTGGC | SEQ ID NO: 19 |
| Reverse | ACCAACAGCGTGGGCTGGGCGGTGATTACCGATGAA | |
| translation | TATAAAGTGCCGAGCAAAAAATTTAAAGTGCTGGGC | |
| of | AACACCGATCGCCATAGCATTAAAAAAAACCTGATT | |
| SwissProt | GGCGCGCTGCTGTTTGATAGCGGCGAAACCGCGGAA | |
| Accession | GCGACCCGCCTGAAACGCACCGCGCGCCGCCGCTAT | |
| No. | ACCCGCCGCAAAAACCGCATTTGCTATCTGCAGGAA | |
| Q99ZW2 | ATTTTTAGCAACGAAATGGCGAAAGTGGATGATAGC | |
| Streptococcus | TTTTTTCATCGCCTGGAAGAAAGCTTTCTGGTGGAAG | |
| pyogenes | AAGATAAAAAACATGAACGCCATCCGATTTTTGGCA | |
| | ACATTGTGGATGAAGTGGCGTATCATGAAAAATATC | |
| | CGACCATTTATCATCTGCGCAAAAAACTGGTGGATA | |
| | GCACCGATAAAGCGGATCTGCGCCTGATTTATCTGG | |
| | CGCTGGCGCATATGATTAAATTTCGCGGCCATTTTCT | |
| | GATTGAAGGCGATCTGAACCCGGATAACAGCGATGT | |
| | GGATAAACTGTTTATTCAGCTGGTGCAGACCTATAA | |
| | CCAGCTGTTTGAAGAAAACCCGATTAACGCGAGCGG | |
| | CGTGGATGCGAAAGCGATTCTGAGCGCGCGCCTGAG | |
| | CAAAAGCCGCCGCCTGGAAAACCTGATTGCGCAGCT | |
| | GCCGGGCGAAAAAAAAAACGGCCTGTTTGGCAACCT | |
| | GATTGCGCTGAGCCTGGGCCTGACCCCGAACTTTAA | |
| | AAGCAACTTTGATCTGGCGGAAGATGCGAAACTGCA | |
| | GCTGAGCAAAGATACCTATGATGATGATCTGGATAA | |
| | CCTGCTGGCGCAGATTGGCGATCAGTATGCGGATCT | |
| | GTTTCTGGCGGCGAAAAACCTGAGCGATGCGATTCT | |
| | GCTGAGCGATATTCTGCGCGTGAACACCGAAATTAC | |
| | CAAAGCGCCGCTGAGCGCGAGCATGATTAAACGCTA | |
| | TGATGAACATCATCAGGATCTGACCCTGCTGAAAGC | |
| | GCTGGTGCGCCAGCAGCTGCCGGAAAAATATAAAG | |
| | AAATTTTTTTTGATCAGAGCAAAAACGGCTATGCGG | |
| | GCTATATTGATGGCGGCGCGAGCCAGGAAGAATTTT | |
| | ATAAATTTATTAAACCGATTCTGGAAAAAATGGATG | |
| | GCACCGAAGAACTGCTGGTGAAACTGAACCGCGAA | |
| | GATCTGCTGCGCAAACAGCGCACCTTTGATAACGGC | |
| | AGCATTCCGCATCAGATTCATCTGGGCGAACTGCAT | |
| | GCGATTCTGCGCCGCCAGGAAGATTTTTATCCGTTTC | |
| | TGAAAGATAACCGCGAAAAAATTGAAAAAATTCTG | |
| | ACCTTTCGCATTCCGTATTATGTGGGCCCGCTGGCGC | |
| | GCGGCAACAGCCGCTTTGCGTGGATGACCCGCAAAA | |
| | GCGAAGAAACCATTACCCCGTGGAACTTTGAAGAAG | |
| | TGGTGGATAAAGGCGCGAGCGCGCAGAGCTTTATTG | |
| | AACGCATGACCAACTTTGATAAAAACCTGCCGAACG | |
| | AAAAAGTGCTGCCGAAACATAGCCTGCTGTATGAAT | |
| | ATTTTACCGTGTATAACGAACTGACCAAAGTGAAAT | |
| | ATGTGACCGAAGGCATGCGCAAACCGGCGTTTCTGA | |
| | GCGGCGAACAGAAAAAAGCGATTGTGGATCTGCTGT | |
| | TTAAAACCAACCGCAAAGTGACCGTGAAACAGCTGA | |
| | AAGAAGATTATTTTAAAAAAATTGAATGCTTTGATA | |
| | GCGTGGAAATTAGCGGCGTGGAAGATCGCTTTAACG | |
| | CGAGCCTGGGCACCTATCATGATCTGCTGAAAATTA | |
| | TTAAAGATAAAGATTTTCTGGATAACGAAGAAAACG | |
| | AAGATATTCTGGAAGATATTGTGCTGACCCTGACCC | |
| | TGTTTGAAGATCGCGAAATGATTGAAGAACGCCTGA | |
| | AAACCTATGCGCATCTGTTTGATGATAAAGTGATGA | |
| | AACAGCTGAAACGCCGCCGCTATACCGGCTGGGGCC | |
| | GCCTGAGCCGCAAACTGATTAACGGCATTCGCGATA | |
| | AACAGAGCGGCAAAACCATTCTGGATTTTCTGAAAA | |
| | GCGATGGCTTTGCGAACCGCAACTTTATGCAGCTGA | |
| | TTCATGATGATAGCCTGACCTTTAAAGAAGATATTC | |
| | AGAAAGCGCAGGTGAGCGGCCAGGGCGATAGCCTG | |
| | CATGAACATATTGCGAACCTGGCGGGCAGCCCGGCG | |
| | ATTAAAAAAGGCATTCTGCAGACCGTGAAAGTGGTG | |
| | GATGAACTGGTGAAAGTGATGGGCCGCCATAAACCG | |
| | GAAAACATTGTGATTGAAATGGCGCGCGAAAACCA | |
| | GACCACCCAGAAAGGCCAGAAAAACAGCCGCGAAC | |
| | GCATGAAACGCATTGAAGAAGGCATTAAAGAACTG | |
| | GGCAGCCAGATTCTGAAAGAACATCCGGTGGAAAA | |
| | CACCCAGCTGCAGAACGAAAAACTGTATCTGTATTA | |
| | TCTGCAGAACGGCCGCGATATGTATGTGGATCAGGA | |
| | ACTGGATATTAACCGCCTGAGCGATTATGATGTGGA | |
| | TCATATTGTGCCGCAGAGCTTTCTGAAAGATGATAG | |
| | CATTGATAACAAAGTGCTGACCCGCAGCGATAAAAA | |
| | CCGCGGCAAAAGCGATAACGTGCCGAGCGAAGAAG | |
| | TGGTGAAAAAAATGAAAAACTATTGGCGCCAGCTGC | |
| | TGAACGCGAAACTGATTACCCAGCGCAAATTTGATA | |
| | ACCTGACCAAAGCGGAACGCGGCGGCCTGAGCGAA | |
| | CTGGATAAAGCGGGCTTTATTAAACGCCAGCTGGTG | |
| | GAAACCCGCCAGATTACCAAACATGTGGCGCAGATT | |
| | CTGGATAGCCGCATGAACACCAAATATGATGAAAAC | |
| | GATAAACTGATTCGCGAAGTGAAAGTGATTACCCTG | |
| | AAAAGCAAACTGGTGAGCGATTTTCGCAAAGATTTT | |
| | CAGTTTTATAAAGTGCGCGAAATTAACAACTATCAT | |
| | CATGCGCATGATGCGTATCTGAACGCGGTGGTGGGC | |
| | ACCGCGCTGATTAAAAAATATCCGAAACTGGAAAGC | |
| | GAATTTGTGTATGGCGATTATAAAGTGTATGATGTG | |
| | CGCAAAATGATTGCGAAAAGCGAACAGGAAATTGG | |
| | CAAAGCGACCGCGAAATATTTTTTTTATAGCAACAT | |
| | TATGAACTTTTTTAAAACCGAAATTACCCTGGCGAA | |
| | CGGCGAAATTCGCAAACGCCCGCTGATTGAAACCAA | |
| | CGGCGAAACCGGCGAAATTGTGTGGGATAAAGGCC | |
| | GCGATTTTGCGACCGTGCGCAAAGTGCTGAGCATGC | |
| | CGCAGGTGAACATTGTGAAAAAAACCGAAGTGCAG | |
| | ACCGGCGGCTTTAGCAAAGAAAGCATTCTGCCGAAA | |
| | CGCAACAGCGATAAACTGATTGCGCGCAAAAAAGA | |
| | TTGGGATCCGAAAAAATATGGCGGCTTTGATAGCCC | |
| | GACCGTGGCGTATAGCGTGCTGGTGGTGGCGAAAGT | |
| | GGAAAAAGGCAAAAGCAAAAAACTGAAAAGCGTGA | |
| | AAGAACTGCTGGGCATTACCATTATGGAACGCAGCA | |
| | GCTTTGAAAAAAACCCGATTGATTTTCTGGAAGCGA | |
| | AAGGCTATAAAGAAGTGAAAAAAGATCTGATTATTA | |
| | AACTGCCGAAATATAGCCTGTTTGAACTGGAAAACG | |
| | GCCGCAAACGCATGCTGGCGAGCGCGGGCGAACTG | |
| | CAGAAAGGCAACGAACTGGCGCTGCCGAGCAAATA | |
| | TGTGAACTTTCTGTATCTGGCGAGCCATTATGAAAA | |
| | ACTGAAAGGCAGCCCGGAAGATAACGAACAGAAAC | |
| | AGCTGTTTGTGGAACAGCATAAACATTATCTGGATG | |
| | AAATTATTGAACAGATTAGCGAATTTAGCAAACGCG | |
| | TGATTCTGGCGGATGCGAACCTGGATAAAGTGCTGA | |
| | GCGCGTATAACAAACATCGCGATAAACCGATTCGCG | |
| | AACAGGCGGAAAACATTATTCATCTGTTTACCCTGA | |
| | CCAACCTGGGCGCGCCGGCGGCGTTTAAATATTTTG | |
| | ATACCACCATTGATCGCAAACGCTATACCAGCACCA | |
| | AAGAAGTGCTGGATGCGACCCTGATTCATCAGAGCA | |
| | TTACCGGCCTGTATGAAACCCGCATTGATCTGAGCC | |
| | AGCTGGGCGGCGAT | |

[0319] The prime editors described herein may include canonical SpCas9, or any variant thereof having at least 80%, at least 85%, at least 90%, at least 95%, or at least 99% sequence identity with a wild type Cas9 sequence provided above. These variants may include SpCas9 variants containing one or more mutations, including any known mutation reported with the SwissProt Accession No. Q99ZW2 (SEQ ID NO: 18) entry, which include:

| SpCas9 mutation (relative to the amino | Function/Characteristic (as reported) (see |
|---|---|
| acid sequence of the canonical SpCas9 | UniProtKB - Q99ZW2 (CAS9_STRPT1) entry - |
| sequence, SEQ ID NO: 18) | incorporated herein by reference) |
| D10A | Nickase mutant which cleaves the protospacer |
| | strand (but no cleavage of non-protospacer strand) |
| S15A | Decreased DNA cleavage activity |
| R66A | Decreased DNA cleavage activity |
| R70A | No DNA cleavage |
| R74A | Decreased DNA cleavage |
| R78A | Decreased DNA cleavage |
| 97-150 deletion | No nuclease activity |
| R165A | Decreased DNA cleavage |
| 175-307 deletion | About 50% decreased DNA cleavage |
| 312-409 deletion | No nuclease activity |
| E762A | Nickase |
| H840A | Nickase mutant which cleaves the non-protospacer |
| | strand but does not cleave the protospacer strand |
| N854A | Nickase |
| N863A | Nickase |
| H982A | Decreased DNA cleavage |
| D986A | Nickase |
| 1099-1368 deletion | No nuclease activity |
| R1333A | Reduced DNA binding |

[0320] Other wild type SpCas9 sequences that may be used in the present disclosure, include:

| Description | Sequence | SEQ ID NO: |
|---|---|---|
| SpCas9 | ATGGATAAGAAATACTCAATAGGCTTAGATATCGGCA | SEQ ID NO: 20 |
| Streptococcus | CAAATAGCGTCGGATGGGCGGTGATCACTGATGATTA | |
| pyogenes | TAAGGTTCCGTCTAAAAAGTTCAAGGTTCTGGGAAAT | |
| MGAS1882 | ACAGACCGCCACAGTATCAAAAAAAATCTTATAGGGG | |
| wild type | CTCTTTTATTTGGCAGTGGAGAGACAGCGGAAGCGAC | |
| NC_017053.1 | TCGTCTCAAACGGACAGCTCGTAGAAGGTATACACGT | |
| | CGGAAGAATCGTATTTGTTATCTACAGGAGATTTTTTC | |
| | AAATGAGATGGCGAAAGTAGATGATAGTTTCTTTCATC | |
| | GACTTGAAGAGTCTTTTTTGGTGGAAGAAGACAAGAA | |
| | GCATGAACGTCATCCTATTTTTGGAAATATAGTAGATG | |
| | AAGTTGCTTATCATGAGAAATATCCAACTATCTATCAT | |
| | CTGCGAAAAAAATTGGCAGATTCTACTGATAAAGCGG | |
| | ATTTGCGCTTAATCTATTTGGCCTTAGCGCATATGATT | |
| | AAGTTTCGTGGTCATTTTTTGATTGAGGGAGATTTAAA | |
| | TCCTGATAATAGTGATGTGGACAAACTATTTATCCAGT | |
| | TGGTACAAATCTACAATCAATTATTTGAAGAAAACCCT | |
| | ATTAACGCAAGTAGAGTAGATGCTAAAGCGATTCTTTC | |
| | TGCACGATTGAGTAAATCAAGACGATTAGAAAATCTC | |
| | ATTGCTCAGCTCCCCGGTGAGAAGAGAAATGGCTTGTT | |
| | TGGGAATCTCATTGCTTTGTCATTGGGATTGACCCCTA | |
| | ATTTTAAATCAAATTTTGATTTGGCAGAAGATGCTAAA | |
| | TTACAGCTTTCAAAAGATACTTACGATGATGATTTAGA | |
| | TAATTTATTGGCGCAAATTGGAGATCAATATGCTGATT | |
| | TGTTTTTGGCAGCTAAGAATTTATCAGATGCTATTTTA | |
| | CTTTCAGATATCCTAAGAGTAAATAGTGAAATAACTA | |
| | AGGCTCCCCTATCAGCTTCAATGATTAAGCGCTACGAT | |
| | GAACATCATCAAGACTTGACTCTTTTAAAAGCTTTAGT | |
| | TCGACAACAACTTCCAGAAAAGTATAAAGAAATCTTT | |
| | TTTGATCAATCAAAAAACGGATATGCAGGTTATATTGA | |
| | TGGGGGAGCTAGCCAAGAAGAATTTTATAAATTTATC | |
| | AAACCAATTTTAGAAAAAATGGATGGTACTGAGGAAT | |
| | TATTGGTGAAACTAAATCGTGAAGATTTGCTGCGCAA | |
| | GCAACGGACCTTTGACAACGGCTCTATTCCCCATCAAA | |
| | TTCACTTGGGTGAGCTGCATGCTATTTTGAGAAGACAA | |
| | GAAGACTTTTATCCATTTTTAAAAGACAATCGTGAGAA | |
| | GATTGAAAAAATCTTGACTTTTCGAATTCCTTATTATG | |
| | TTGGTCCATTGGCGCGTGGCAATAGTCGTTTTGCATGG | |
| | ATGACTCGGAAGTCTGAAGAAACAATTACCCCATGGA | |
| | ATTTTGAAGAAGTTGTCGATAAAGGTGCTTCAGCTCAA | |
| | TCATTTATTGAACGCATGACAAACTTTGATAAAAATCT | |
| | TCCAAATGAAAAAGTACTACCAAAACATAGTTTGCTTT | |
| | ATGAGTATTTTACGGTTTATAACGAATTGACAAAGGTC | |
| | AAATATGTTACTGAGGGAATGCGAAAACCAGCATTTC | |
| | TTTCAGGTGAACAGAAGAAAGCCATTGTTGATTTACTC | |
| | TTCAAAACAAATCGAAAAGTAACCGTTAAGCAATTAA | |
| | AAGAAGATTATTTCAAAAAAATAGAATGTTTTGATAG | |
| | TGTTGAAATTTCAGGAGTTGAAGATAGATTTAATGCTT | |
| | CATTAGGCGCCTACCATGATTTGCTAAAAATTATTAAA | |
| | GATAAAGATTTTTTGGATAATGAAGAAAATGAAGATA | |
| | TCTTAGAGGATATTGTTTTAACATTGACCTTATTTGAA | |
| | GATAGGGGGATGATTGAGGAAAGACTTAAAACATATG | |
| | CTCACCTCTTTGATGATAAGGTGATGAAACAGCTTAAA | |
| | CGTCGCCGTTATACTGGTTGGGGACGTTTGTCTCGAAA | |
| | ATTGATTAATGGTATTAGGGATAAGCAATCTGGCAAA | |
| | ACAATATTAGATTTTTTGAAATCAGATGGTTTTGCCAA | |
| | TCGCAATTTTATGCAGCTGATCCATGATGATAGTTTGA | |
| | CATTTAAAGAAGATATTCAAAAAGCACAGGTGTCTGG | |
| | ACAAGGCCATAGTTTACATGAACAGATTGCTAACTTA | |
| | GCTGGCAGTCCTGCTATTAAAAAAGGTATTTTACAGAC | |
| | TGTAAAAATTGTTGATGAACTGGTCAAAGTAATGGGG | |
| | CATAAGCCAGAAAATATCGTTATTGAAATGGCACGTG | |
| | AAAATCAGACAACTCAAAAGGGCCAGAAAAATTCGCG | |
| | AGAGCGTATGAAACGAATCGAAGAAGGTATCAAAGA | |
| | ATTAGGAAGTCAGATTCTTAAAGAGCATCCTGTTGAA | |
| | AATACTCAATTGCAAAATGAAAAGCTCTATCTCTATTA | |
| | TCTACAAAATGGAAGAGACATGTATGTGGACCAAGAA | |
| | TTAGATATTAATCGTTTAAGTGATTATGATGTCGATCA | |
| | CATTGTTCCACAAAGTTTCATTAAAGACGATTCAATAG | |
| | ACAATAAGGTACTAACGCGTTCTGATAAAAATCGTGG | |
| | TAAATCGGATAACGTTCCAAGTGAAGAAGTAGTCAAA | |
| | AAGATGAAAAACTATTGGAGACAACTTCTAAACGCCA | |
| | AGTTAATCACTCAACGTAAGTTTGATAATTTAACGAAA | |
| | GCTGAACGTGGAGGTTTGAGTGAACTTGATAAAGCTG | |
| | GTTTTATCAAACGCCAATTGGTTGAAACTCGCCAAATC | |
| | ACTAAGCATGTGGCACAAATTTTGGATAGTCGCATGA | |
| | ATACTAAATACGATGAAAATGATAAACTTATTCGAGA | |
| | GGTTAAAGTGATTACCTTAAAATCTAAATTAGTTTCTG | |
| | ACTTCCGAAAAGATTTCCAATTCTATAAAGTACGTGAG | |
| | ATTAACAATTACCATCATGCCCATGATGCGTATCTAAA | |
| | TGCCGTCGTTGGAACTGCTTTGATTAAGAAATATCCAA | |
| | AACTTGAATCGGAGTTTGTCTATGGTGATTATAAAGTT | |
| | TATGATGTTCGTAAAATGATTGCTAAGTCTGAGCAAGA | |
| | AATAGGCAAAGCAACCGCAAAATATTTCTTTTACTCTA | |
| | ATATCATGAACTTCTTCAAAACAGAAATTACACTTGCA | |
| | AATGGAGAGATTCGCAAACGCCCTCTAATCGAAACTA | |
| | ATGGGGAAACTGGAGAAATTGTCTGGGATAAAGGGCG | |
| | AGATTTTGCCACAGTGCGCAAAGTATTGTCCATGCCCC | |
| | AAGTCAATATTGTCAAGAAAACAGAAGTACAGACAGG | |
| | CGGATTCTCCAAGGAGTCAATTTTACCAAAAAGAAAT | |
| | TCGGACAAGCTTATTGCTCGTAAAAAAGACTGGGATC | |
| | CAAAAAAATATGGTGGTTTTGATAGTCCAACGGTAGC | |
| | TTATTCAGTCCTAGTGGTTGCTAAGGTGGAAAAAGGG | |
| | AAATCGAAGAAGTTAAAATCCGTTAAAGAGTTACTAG | |
| | GGATCACAATTATGGAAAGAAGTTCCTTTGAAAAAAA | |
| | TCCGATTGACTTTTTAGAAGCTAAAGGATATAAGGAA | |
| | GTTAAAAAAGACTTAATCATTAAACTACCTAAATATA | |
| | GTCTTTTTGAGTTAGAAAACGGTCGTAAACGGATGCTG | |
| | GCTAGTGCCGGAGAATTACAAAAAGGAAATGAGCTGG | |
| | CTCTGCCAAGCAAATATGTGAATTTTTTATATTTAGCT | |
| | AGTCATTATGAAAAGTTGAAGGGTAGTCCAGAAGATA | |
| | ACGAACAAAAACAATTGTTTGTGGAGCAGCATAAGCA | |
| | TTATTTAGATGAGATTATTGAGCAAATCAGTGAATTTT | |
| | CTAAGCGTGTTATTTTAGCAGATGCCAATTTAGATAAA | |
| | GTTCTTAGTGCATATAACAAACATAGAGACAAACCAA | |
| | TACGTGAACAAGCAGAAAATATTATTCATTTATTTACG | |
| | TTGACGAATCTTGGAGCTCCCGCTGCTTTTAAATATTT | |
| | TGATACAACAATTGATCGTAAACGATATACGTCTACA | |
| | AAAGAAGTTTTAGATGCCACTCTTATCCATCAATCCAT | |
| | CACTGGTCTTTATGAAACACGCATTGATTTGAGTCAGC | |
| | TAGGAGGTGACTGA | |
| SpCas9 | MDKKYSIGLDIGTNSVGWAVITDDYKVPSKKFKVLGNT | SEQ ID NO: 21 |
| Streptococcus | DRHSIKKNLIGALLFGSGETAEATRLKRTARRRYTRRKN | |
| pyogenes | RICYLQEIFSNEMAKVDDSFFHRLEESFLVEEDKKHERHP | |
| MGAS1882 | IFGNIVDEVAYHEKYPTIYHLRKKLADSTDKADLRLIYLA | |
| wild type | LAHMIKFRGHFLIEGDLNPDNSDVDKLFIQLVQIYNQLFE | |
| NC_017053.1 | ENPINASRVDAKAILSARLSKSRRLENLIAQLPGEKRNGL | |
| | FGNLIALSLGLTPNFKSNFDLAEDAKLQLSKDTYDDDLD | |
| | NLLAQIGDQYADLFLAAKNLSDAILLSDILRVNSEITKAP | |
| | LSASMIKRYDEHHQDLTLLKALVRQQLPEKYKEIFFDQS | |
| | KNGYAGYIDGGASQEEFYKFIKPILEKMDGTEELLVKLN | |
| | REDLLRKQRTFDNGSIPHQIHLGELHAILRRQEDFYPFLK | |
| | DNREKIEKILTFRIPYYVGPLARGNSRFAWMTRKSEETITP | |
| | WNFEEVVDKGASAQSFIERMTNFDKNLPNEKVLPKHSLL | |
| | YEYFTVYNELTKVKYVTEGMRKPAFLSGEQKKAIVDLLF | |
| | KTNRKVTVKQLKEDYFKKIECFDSVEISGVEDRFNASLG | |
| | AYHDLLKIIKDKDFLDNEENEDILEDIVLTLTLFEDRGMIE | |
| | ERLKTYAHLFDDKVMKQLKRRRYTGWGRLSRKLINGIR | |
| | DKQSGKTILDFLKSDGFANRNFMQLIHDDSLTFKEDIQKA | |
| | QVSGQGHSLHEQIANLAGSPAIKKGILQTVKIVDELVKV | |
| | MGHKPENIVIEMARENQTTQKGQKNSRERMKRIEEGIKE | |
| | LGSQILKEHPVENTQLQNEKLYLYYLQNGRDMYVDQEL | |
| | DINRLSDYDVDHIVPQSFIKDDSIDNKVLTRSDKNRGKSD | |
| | NVPSEEVVKKMKNYWRQLLNAKLITQRKFDNLTKAERG | |
| | GLSELDKAGFIKRQLVETRQITKHVAQILDSRMNTKYDE | |
| | NDKLIREVKVITLKSKLVSDFRKDFQFYKVREINNYHHA | |
| | HDAYLNAVVGTALIKKYPKLESEFVYGDYKVYDVRKMI | |
| | AKSEQEIGKATAKYFFYSNIMNFFKTEITLANGEIRKRPLI | |
| | ETNGETGEIVWDKGRDFATVRKVLSMPQVNIVKKTEVQ | |
| | TGGFSKESILPKRNSDKLIARKKDWDPKKYGGFDSPTVA | |
| | YSVLVVAKVEKGKSKKLKSVKELLGITIMERSSFEKNPlD | |
| | FLEAKGYKEVKKDLIIKLPKYSLFELENGRKRMLASAGE | |
| | LQKGNELALPSKYVNFLYLASHYEKLKGSPEDNEQKQLF | |
| | VEQHKHYLDEIIEQISEFSKRVILADANLDKVLSAYNKHR | |
| | DKPlREQAENIIHLFTLTNLGAPAAFKYFDTTIDRKRYTST | |
| | KEVLDATLIHQSITGLYETRIDLSQLGGD | |
| SpCas9 | ATGGATAAAAAGTATTCTATTGGTTTAGACATCGGCAC | SEQ ID NO: 22 |
| Streptococcus | TAATTCCGTTGGATGGGCTGTCATAACCGATGAATACA | |
| pyogenes | AAGTACCTTCAAAGAAATTTAAGGTGTTGGGGAACAC | |
| wild type | AGACCGTCATTCGATTAAAAAGAATCTTATCGGTGCCC | |
| SWBC2D7W | TCCTATTCGATAGTGGCGAAACGGCAGAGGCGACTCG | |
| 014 | CCTGAAACGAACCGCTCGGAGAAGGTATACACGTCGC | |
| | AAGAACCGAATATGTTACTTACAAGAAATTTTTAGCA | |
| | ATGAGATGGCCAAAGTTGACGATTCTTTCTTTCACCGT | |
| | TTGGAAGAGTCCTTCCTTGTCGAAGAGGACAAGAAAC | |
| | ATGAACGGCACCCCATCTTTGGAAACATAGTAGATGA | |
| | GGTGGCATATCATGAAAAGTACCCAACGATTTATCAC | |
| | CTCAGAAAAAAGCTAGTTGACTCAACTGATAAAGCGG | |
| | ACCTGAGGTTAATCTACTTGGCTCTTGCCCATATGATA | |
| | AAGTTCCGTGGGCACTTTCTCATTGAGGGTGATCTAAA | |
| | TCCGGACAACTCGGATGTCGACAAACTGTTCATCCAGT | |
| | TAGTACAAACCTATAATCAGTTGTTTGAAGAGAACCCT | |
| | ATAAATGCAAGTGGCGTGGATGCGAAGGCTATTCTTA | |
| | GCGCCCGCCTCTCTAAATCCCGACGGCTAGAAAACCT | |
| | GATCGCACAATTACCCGGAGAGAAGAAAAATGGGTTG | |
| | TTCGGTAACCTTATAGCGCTCTCACTAGGCCTGACACC | |
| | AAATTTTAAGTCGAACTTCGACTTAGCTGAAGATGCCA | |
| | AATTGCAGCTTAGTAAGGACACGTACGATGACGATCT | |
| | CGACAATCTACTGGCACAAATTGGAGATCAGTATGCG | |
| | GACTTATTTTTGGCTGCCAAAAACCTTAGCGATGCAAT | |
| | CCTCCTATCTGACATACTGAGAGTTAATACTGAGATTA | |
| | CCAAGGCGCCGTTATCCGCTTCAATGATCAAAAGGTA | |
| | CGATGAACATCACCAAGACTTGACACTTCTCAAGGCC | |
| | CTAGTCCGTCAGCAACTGCCTGAGAAATATAAGGAAA | |
| | TATTCTTTGATCAGTCGAAAAACGGGTACGCAGGTTAT | |
| | ATTGACGGCGGAGCGAGTCAAGAGGAATTCTACAAGT | |
| | TTATCAAACCCATATTAGAGAAGATGGATGGGACGGA | |
| | AGAGTTGCTTGTAAAACTCAATCGCGAAGATCTACTGC | |
| | GAAAGCAGCGGACTTTCGACAACGGTAGCATTCCACA | |
| | TCAAATCCACTTAGGCGAATTGCATGCTATACTTAGAA | |
| | GGCAGGAGGATTTTTATCCGTTCCTCAAAGACAATCGT | |
| | GAAAAGATTGAGAAAATCCTAACCTTTCGCATACCTTA | |
| | CTATGTGGGACCCCTGGCCCGAGGGAACTCTCGGTTCG | |
| | CATGGATGACAAGAAAGTCCGAAGAAACGATTACTCC | |
| | ATGGAATTTTGAGGAAGTTGTCGATAAAGGTGCGTCA | |
| | GCTCAATCGTTCATCGAGAGGATGACCAACTTTGACA | |
| | AGAATTTACCGAACGAAAAAGTATTGCCTAAGCACAG | |
| | TTTACTTTACGAGTATTTCACAGTGTACAATGAACTCA | |
| | CGAAAGTTAAGTATGTCACTGAGGGCATGCGTAAACC | |
| | CGCCTTTCTAAGCGGAGAACAGAAGAAAGCAATAGTA | |
| | GATCTGTTATTCAAGACCAACCGCAAAGTGACAGTTA | |
| | AGCAATTGAAAGAGGACTACTTTAAGAAAATTGAATG | |
| | CTTCGATTCTGTCGAGATCTCCGGGGTAGAAGATCGAT | |
| | TTAATGCGTCACTTGGTACGTATCATGACCTCCTAAAG | |
| | ATAATTAAAGATAAGGACTTCCTGGATAACGAAGAGA | |
| | ATGAAGATATCTTAGAAGATATAGTGTTGACTCTTACC | |
| | CTCTTTGAAGATCGGGAAATGATTGAGGAAAGACTAA | |
| | AAACATACGCTCACCTGTTCGACGATAAGGTTATGAA | |
| | ACAGTTAAAGAGGCGTCGCTATACGGGCTGGGGACGA | |
| | TTGTCGCGGAAACTTATCAACGGGATAAGAGACAAGC | |
| | AAAGTGGTAAAACTATTCTCGATTTTCTAAAGAGCGAC | |
| | GGCTTCGCCAATAGGAACTTTATGCAGCTGATCCATGA | |
| | TGACTCTTTAACCTTCAAAGAGGATATACAAAAGGCA | |
| | CAGGTTTCCGGACAAGGGGACTCATTGCACGAACATA | |
| | TTGCGAATCTTGCTGGTTCGCCAGCCATCAAAAAGGGC | |
| | ATACTCCAGACAGTCAAAGTAGTGGATGAGCTAGTTA | |
| | AGGTCATGGGACGTCACAAACCGGAAAACATTGTAAT | |
| | CGAGATGGCACGCGAAAATCAAACGACTCAGAAGGG | |
| | GCAAAAAAACAGTCGAGAGCGGATGAAGAGAATAGA | |
| | AGAGGGTATTAAAGAACTGGGCAGCCAGATCTTAAAG | |
| | GAGCATCCTGTGGAAAATACCCAATTGCAGAACGAGA | |
| | AACTTTACCTCTATTACCTACAAAATGGAAGGGACATG | |
| | TATGTTGATCAGGAACTGGACATAAACCGTTTATCTGA | |
| | TTACGACGTCGATCACATTGTACCCCAATCCTTTTTGA | |
| | AGGACGATTCAATCGACAATAAAGTGCTTACACGCTC | |
| | GGATAAGAACCGAGGGAAAAGTGACAATGTTCCAAGC | |
| | GAGGAAGTCGTAAAGAAAATGAAGAACTATTGGCGGC | |
| | AGCTCCTAAATGCGAAACTGATAACGCAAAGAAAGTT | |
| | CGATAACTTAACTAAAGCTGAGAGGGGTGGCTTGTCT | |
| | GAACTTGACAAGGCCGGATTTATTAAACGTCAGCTCGT | |
| | GGAAACCCGCCAAATCACAAAGCATGTTGCACAGATA | |
| | CTAGATTCCCGAATGAATACGAAATACGACGAGAACG | |
| | ATAAGCTGATTCGGGAAGTCAAAGTAATCACTTTAAA | |
| | GTCAAAATTGGTGTCGGACTTCAGAAAGGATTTTCAAT | |
| | TCTATAAAGTTAGGGAGATAAATAACTACCACCATGC | |
| | GCACGACGCTTATCTTAATGCCGTCGTAGGGACCGCAC | |
| | TCATTAAGAAATACCCGAAGCTAGAAAGTGAGTTTGT | |
| | GTATGGTGATTACAAAGTTTATGACGTCCGTAAGATGA | |
| | TCGCGAAAAGCGAACAGGAGATAGGCAAGGCTACAG | |
| | CCAAATACTTCTTTTATTCTAACATTATGAATTTCTTTA | |
| | AGACGGAAATCACTCTGGCAAACGGAGAGATACGCAA | |
| | ACGACCTTTAATTGAAACCAATGGGGAGACAGGTGAA | |
| | ATCGTATGGGATAAGGGCCGGGACTTCGCGACGGTGA | |
| | GAAAAGTTTTGTCCATGCCCCAAGTCAACATAGTAAA | |
| | GAAAACTGAGGTGCAGACCGGAGGGTTTTCAAAGGAA | |
| | TCGATTCTTCCAAAAAGGAATAGTGATAAGCTCATCGC | |
| | TCGTAAAAAGGACTGGGACCCGAAAAAGTACGGTGGC | |
| | TTCGATAGCCCTACAGTTGCCTATTCTGTCCTAGTAGT | |
| | GGCAAAAGTTGAGAAGGGAAAATCCAAGAAACTGAA | |
| | GTCAGTCAAAGAATTATTGGGGATAACGATTATGGAG | |
| | CGCTCGTCTTTTGAAAAGAACCCCATCGACTTCCTTGA | |
| | GGCGAAAGGTTACAAGGAAGTAAAAAAGGATCTCATA | |
| | ATTAAACTACCAAAGTATAGTCTGTTTGAGTTAGAAAA | |
| | TGGCCGAAAACGGATGTTGGCTAGCGCCGGAGAGCTT | |
| | CAAAAGGGGAACGAACTCGCACTACCGTCTAAATACG | |
| | TGAATTTCCTGTATTTAGCGTCCCATTACGAGAAGTTG | |
| | AAAGGTTCACCTGAAGATAACGAACAGAAGCAACTTT | |
| | TTGTTGAGCAGCACAAACATTATCTCGACGAAATCATA | |
| | GAGCAAATTTCGGAATTCAGTAAGAGAGTCATCCTAG | |
| | CTGATGCCAATCTGGACAAAGTATTAAGCGCATACAA | |
| | CAAGCACAGGGATAAACCCATACGTGAGCAGGCGGAA | |
| | AATATTATCCATTTGTTTACTCTTACCAACCTCGGCGCT | |
| | CCAGCCGCATTCAAGTATTTTGACACAACGATAGATCG | |
| | CAAACGATACACTTCTACCAAGGAGGTGCTAGACGCG | |
| | ACACTGATTCACCAATCCATCACGGGATTATATGAAAC | |
| | TCGGATAGATTTGTCACAGCTTGGGGGTGACGGATCCC | |
| | CCAAGAAGAAGAGGAAAGTCTCGAGCGACTACAAAG | |
| | ACCATGACGGTGATTATAAAGATCATGACATCGATTA | |
| | CAAGGATGACGATGACAAGGCTGCAGGA | |
| SpCas9 | MDKKYSIGLDIGTNSVGWAVITDEYKVPSKKFKVLGNTD | SEQ ID NO: 23 |
| Streptococcus | RHSIKKNLIGALLFDSGETAEATRLKRTARRRYTRRKNRI | |
| pyogenes | CYLQEIFSNEMAKVDDSFFHRLEESFLVEEDKKHERHPIF | |
| wild type | GNIVDEVAYHEKYPTIYHLRKKLVDSTDKADLRLIYLAL | |
| Encoded | AHMIKFRGHFLIEGDLNPDNSDVDKLFIQLVQTYNQLFEE | |
| product of | NPINASGVDAKAILSARLSKSRRLENLIAQLPGEKKNGLF | |
| SWBC2D7W | GNLIALSLGLTPNFKSNFDLAEDAKLQLSKDTYDDDLDN | |
| 014 | LLAQIGDQYADLFLAAKNLSDAILLSDILRVNTEITKAPLS | |
| | ASMIKRYDEHHQDLTLLKALVRQQLPEKYKEIFFDQSKN | |
| | GYAGYIDGGASQEEFYKFIKPILEKMDGTEELLVKLNRE | |
| | DLLRKQRTFDNGSIPHQIHLGELHAILRRQEDFYPFLKDN | |
| | REKIEKILTFRIPYYVGPLARGNSRFAWMTRKSEETITPW | |
| | NFEEVVDKGASAQSFIERMTNFDKNLPNEKVLPKHSLLY | |
| | EYFTVYNELTKVKYVTEGMRKPAFLSGEQKKAIVDLLFK | |
| | TNRKVTVKQLKEDYFKKIECFDSVEISGVEDRFNASLGT | |
| | YHDLLKIIKDKDFLDNEENEDILEDIVLTLTLFEDREMIEE | |
| | RLKTYAHLFDDKVMKQLKRRRYTGWGRLSRKLINGIRD | |
| | KQSGKTILDFLKSDGFANRNFMQLIHDDSLTFKEDIQKAQ | |
| | VSGQGDSLHEHIANLAGSPAIKKGILQTVKVVDELVKVM | |
| | GRHKPENIVIEMARENQTTQKGQKNSRERMKRIEEGIKE | |
| | LGSQILKEHPVENTQLQNEKLYLYYLQNGRDMYVDQEL | |
| | DINRLSDYDVDHIVPQSFLKDDSIDNKVLTRSDKNRGKS | |
| | DNVPSEEVVKKMKNYWRQLLNAKLITQRKFDNLTKAER | |
| | GGLSELDKAGFIKRQLVETRQITKHVAQILDSRMNTKYD | |
| | ENDKLIREVKVITLKSKLVSDFRKDFQFYKVREINNYHH | |
| | AHDAYLNAVVGTALIKKYPKLESEFVYGDYKVYDVRK | |
| | MIAKSEQEIGKATAKYFFYSNIMNFFKTEITLANGEIRKRP | |
| | LIETNGETGEIVWDKGRDFATVRKVLSMPQVNIVKKTEV | |
| | QTGGFSKESILPKRNSDKLIARKKDWDPKKYGGFDSPTV | |
| | AYSVLVVAKVEKGKSKKLKSVKELLGITIMERSSFEKNPI | |
| | DFLEAKGYKEVKKDLIIKLPKYSLFELENGRKRMLASAG | |
| | ELQKGNELALPSKYVNFLYLASHYEKLKGSPEDNEQKQL | |
| | FVEQHKHYLDEIIEQISEFSKRVILADANLDKVLSAYNKH | |
| | RDKPIREQAENIIHLFTLTNLGAPAAFKYFDTTIDRKRYTS | |
| | TKEVLDATLIHQSITGLYETRIDLSQLGGDGSPKKKRKVS | |
| | SDYKDHDGDYKDHDIDYKDDDDKAAG | |
| SpCas9 | ATGGATAAGAAATACTCAATAGGCTTAGATATCGGCA | SEQ ID NO: 24 |
| Streptococcus | CAAATAGCGTCGGATGGGCGGTGATCACTGATGAATA | |
| pyogenes | TAAGGTTCCGTCTAAAAAGTTCAAGGTTCTGGGAAAT | |
| M1GAS wild | ACAGACCGCCACAGTATCAAAAAAAATCTTATAGGGG | |
| type | CTCTTTTATTTGACAGTGGAGAGACAGCGGAAGCGAC | |
| NC_002737.2 | TCGTCTCAAACGGACAGCTCGTAGAAGGTATACACGT | |
| | CGGAAGAATCGTATTTGTTATCTACAGGAGATTTTTTC | |
| | AAATGAGATGGCGAAAGTAGATGATAGTTTCTTTCATC | |
| | GACTTGAAGAGTCTTTTTTGGTGGAAGAAGACAAGAA | |
| | GCATGAACGTCATCCTATTTTTGGAAATATAGTAGATG | |
| | AAGTTGCTTATCATGAGAAATATCCAACTATCTATCAT | |
| | CTGCGAAAAAAATTGGTAGATTCTACTGATAAAGCGG | |
| | ATTTGCGCTTAATCTATTTGGCCTTAGCGCATATGATT | |
| | AAGTTTCGTGGTCATTTTTTGATTGAGGGAGATTTAAA | |
| | TCCTGATAATAGTGATGTGGACAAACTATTTATCCAGT | |
| | TGGTACAAACCTACAATCAATTATTTGAAGAAAACCCT | |
| | ATTAACGCAAGTGGAGTAGATGCTAAAGCGATTCTTTC | |
| | TGCACGATTGAGTAAATCAAGACGATTAGAAAATCTC | |
| | ATTGCTCAGCTCCCCGGTGAGAAGAAAAATGGCTTATT | |
| | TGGGAATCTCATTGCTTTGTCATTGGGTTTGACCCCTA | |
| | ATTTTAAATCAAATTTTGATTTGGCAGAAGATGCTAAA | |
| | TTACAGCTTTCAAAAGATACTTACGATGATGATTTAGA | |
| | TAATTTATTGGCGCAAATTGGAGATCAATATGCTGATT | |
| | TGTTTTTGGCAGCTAAGAATTTATCAGATGCTATTTTA | |
| | CTTTCAGATATCCTAAGAGTAAATACTGAAATAACTAA | |
| | GGCTCCCCTATCAGCTTCAATGATTAAACGCTACGATG | |
| | AACATCATCAAGACTTGACTCTTTTAAAAGCTTTAGTT | |
| | CGACAACAACTTCCAGAAAAGTATAAAGAAATCTTTT | |
| | TTGATCAATCAAAAAACGGATATGCAGGTTATATTGAT | |
| | GGGGGAGCTAGCCAAGAAGAATTTTATAAATTTATCA | |
| | AACCAATTTTAGAAAAAATGGATGGTACTGAGGAATT | |
| | ATTGGTGAAACTAAATCGTGAAGATTTGCTGCGCAAG | |
| | CAACGGACCTTTGACAACGGCTCTATTCCCCATCAAAT | |
| | TCACTTGGGTGAGCTGCATGCTATTTTGAGAAGACAAG | |
| | AAGACTTTTATCCATTTTTAAAAGACAATCGTGAGAAG | |
| | ATTGAAAAAATCTTGACTTTTCGAATTCCTTATTATGTT | |
| | GGTCCATTGGCGCGTGGCAATAGTCGTTTTGCATGGAT | |
| | GACTCGGAAGTCTGAAGAAACAATTACCCCATGGAAT | |
| | TTTGAAGAAGTTGTCGATAAAGGTGCTTCAGCTCAATC | |
| | ATTTATTGAACGCATGACAAACTTTGATAAAAATCTTC | |
| | CAAATGAAAAAGTACTACCAAAACATAGTTTGCTTTAT | |
| | GAGTATTTTACGGTTTATAACGAATTGACAAAGGTCAA | |
| | ATATGTTACTGAAGGAATGCGAAAACCAGCATTTCTTT | |
| | CAGGTGAACAGAAGAAAGCCATTGTTGATTTACTCTTC | |
| | AAAACAAATCGAAAAGTAACCGTTAAGCAATTAAAAG | |
| | AAGATTATTTCAAAAAAATAGAATGTTTTGATAGTGTT | |
| | GAAATTTCAGGAGTTGAAGATAGATTTAATGCTTCATT | |
| | AGGTACCTACCATGATTTGCTAAAAATTATTAAAGATA | |
| | AAGATTTTTTGGATAATGAAGAAAATGAAGATATCTT | |
| | AGAGGATATTGTTTTAACATTGACCTTATTTGAAGATA | |
| | GGGAGATGATTGAGGAAAGACTTAAAACATATGCTCA | |
| | CCTCTTTGATGATAAGGTGATGAAACAGCTTAAACGTC | |
| | GCCGTTATACTGGTTGGGGACGTTTGTCTCGAAAATTG | |
| | ATTAATGGTATTAGGGATAAGCAATCTGGCAAAACAA | |
| | TATTAGATTTTTTGAAATCAGATGGTTTTGCCAATCGC | |
| | AATTTTATGCAGCTGATCCATGATGATAGTTTGACATT | |
| | TAAAGAAGACATTCAAAAAGCACAAGTGTCTGGACAA | |
| | GGCGATAGTTTACATGAACATATTGCAAATTTAGCTGG | |
| | TAGCCCTGCTATTAAAAAAGGTATTTTACAGACTGTAA | |
| | AAGTTGTTGATGAATTGGTCAAAGTAATGGGGCGGCA | |
| | TAAGCCAGAAAATATCGTTATTGAAATGGCACGTGAA | |
| | AATCAGACAACTCAAAAGGGCCAGAAAAATTCGCGAG | |
| | AGCGTATGAAACGAATCGAAGAAGGTATCAAAGAATT | |
| | AGGAAGTCAGATTCTTAAAGAGCATCCTGTTGAAAAT | |
| | ACTCAATTGCAAAATGAAAAGCTCTATCTCTATTATCT | |
| | CCAAAATGGAAGAGACATGTATGTGGACCAAGAATTA | |
| | GATATTAATCGTTTAAGTGATTATGATGTCGATCACAT | |
| | TGTTCCACAAAGTTTCCTTAAAGACGATTCAATAGACA | |
| | ATAAGGTCTTAACGCGTTCTGATAAAAATCGTGGTAA | |
| | ATCGGATAACGTTCCAAGTGAAGAAGTAGTCAAAAAG | |
| | ATGAAAAACTATTGGAGACAACTTCTAAACGCCAAGT | |
| | TAATCACTCAACGTAAGTTTGATAATTTAACGAAAGCT | |
| | GAACGTGGAGGTTTGAGTGAACTTGATAAAGCTGGTT | |
| | TTATCAAACGCCAATTGGTTGAAACTCGCCAAATCACT | |
| | AAGCATGTGGCACAAATTTTGGATAGTCGCATGAATA | |
| | CTAAATACGATGAAAATGATAAACTTATTCGAGAGGT | |
| | TAAAGTGATTACCTTAAAATCTAAATTAGTTTCTGACT | |
| | TCCGAAAAGATTTCCAATTCTATAAAGTACGTGAGATT | |
| | AACAATTACCATCATGCCCATGATGCGTATCTAAATGC | |
| | CGTCGTTGGAACTGCTTTGATTAAGAAATATCCAAAAC | |
| | TTGAATCGGAGTTTGTCTATGGTGATTATAAAGTTTAT | |
| | GATGTTCGTAAAATGATTGCTAAGTCTGAGCAAGAAA | |
| | TAGGCAAAGCAACCGCAAAATATTTCTTTTACTCTAAT | |
| | ATCATGAACTTCTTCAAAACAGAAATTACACTTGCAAA | |
| | TGGAGAGATTCGCAAACGCCCTCTAATCGAAACTAAT | |
| | GGGGAAACTGGAGAAATTGTCTGGGATAAAGGGCGAG | |
| | ATTTTGCCACAGTGCGCAAAGTATTGTCCATGCCCCAA | |
| | GTCAATATTGTCAAGAAAACAGAAGTACAGACAGGCG | |
| | GATTCTCCAAGGAGTCAATTTTACCAAAAAGAAATTC | |
| | GGACAAGCTTATTGCTCGTAAAAAAGACTGGGATCCA | |
| | AAAAAATATGGTGGTTTTGATAGTCCAACGGTAGCTTA | |
| | TTCAGTCCTAGTGGTTGCTAAGGTGGAAAAAGGGAAA | |
| | TCGAAGAAGTTAAAATCCGTTAAAGAGTTACTAGGGA | |
| | TCACAATTATGGAAAGAAGTTCCTTTGAAAAAAATCC | |
| | GATTGACTTTTTAGAAGCTAAAGGATATAAGGAAGTT | |
| | AAAAAAGACTTAATCATTAAACTACCTAAATATAGTCT | |
| | TTTTGAGTTAGAAAACGGTCGTAAACGGATGCTGGCT | |
| | AGTGCCGGAGAATTACAAAAAGGAAATGAGCTGGCTC | |
| | TGCCAAGCAAATATGTGAATTTTTTATATTTAGCTAGT | |
| | CATTATGAAAAGTTGAAGGGTAGTCCAGAAGATAACG | |
| | AACAAAAACAATTGTTTGTGGAGCAGCATAAGCATTA | |
| | TTTAGATGAGATTATTGAGCAAATCAGTGAATTTTCTA | |
| | AGCGTGTTATTTTAGCAGATGCCAATTTAGATAAAGTT | |
| | CTTAGTGCATATAACAAACATAGAGACAAACCAATAC | |
| | GTGAACAAGCAGAAAATATTATTCATTTATTTACGTTG | |
| | ACGAATCTTGGAGCTCCCGCTGCTTTTAAATATTTTGA | |
| | TACAACAATTGATCGTAAACGATATACGTCTACAAAA | |
| | GAAGTTTTAGATGCCACTCTTATCCATCAATCCATCAC | |
| | TGGTCTTTATGAAACACGCATTGATTTGAGTCAGCTAG | |
| | GAGGTGACTGA | |
| SpCas9 | MDKKYSIGLDIGTNSVGWAVITDEYKVPSKKFKVLGNTD | SEQ ID NO: 25 |
| Streptococcus | RHSIKKNLIGALLFDSGETAEATRLKRTARRRYTRRKNRI | |
| pyogenes | CYLQEIFSNEMAKVDDSFFHRLEESFLVEEDKKHERHPIF | |
| M1GAS wild | GNIVDEVAYHEKYPTIYHLRKKLVDSTDKADLRLIYLAL | |
| type | AHMIKFRGHFLIEGDLNPDNSDVDKLFIQLVQTYNQLFEE | |
| Encoded | NPINTASGVDAKAILSARLSKSRRLENLIAQLPGEKKNGLF | |
| product of | GNLIALSLGLTPNFKSNFDLAEDAKLQLSKDTYDDDLDN | |
| NC_002737.2 | LLAQIGDQYADLFLAAKNLSDAILLSDILRVNTEITKAPLS | |
| (100% | ASMIKRYDEHHQDLTLLKALVRQQLPEKYKEIFFDQSKN | |
| identical to | GYAGYIDGGASQEEFYKFIKPILEKMDGTEELLVKLNRE | |
| the canonical | DLLRKQRTFDNGSIPHQIHLGELHAILRRQEDFYPFLKDN | |
| Q99ZW2 | REKIEKILTFRIPYYVGPLARGNSRFAWMTRKSEETITPW | |
| wild type) | NFEEVVDKGASAQSFIERMTNFDKNLPNEKVLPKHSLLY | |
| | EYFTVYNELTKVKYVTEGMRKPAFLSGEQKKAIVDLLFK | |
| | TNRKVTVKQLKEDYFKKIECFDSVEISGVEDRFNASLGT | |
| | YHDLLKIIKDKDFLDNEENEDILEDIVLTLTLFEDREMIEE | |
| | RLKTYAHLFDDKVMKQLKRRRYTGWGRLSRKLINGIRD | |
| | KQSGKTILDFLKSDGFANRNFMQLIHDDSLTFKEDIQKAQ | |
| | VSGQGDSLHEHIANLAGSPAIKKGILQTVKVVDELVKVM | |
| | GRHKPENIVIEMARENQTTQKGQKNSRERMKRIEEGIKE | |
| | LGSQILKEHPVENTQLQNEKLYLYYLQNGRDMYVDQEL | |
| | DINRLSDYDVDHIVPQSFLKDDSIDNKVLTRSDKNRGKS | |
| | DNVPSEEVVKKMKNYWRQLLNAKLITQRKFDNLTKAER | |
| | GGLSELDKAGFIKRQLVETRQITKHVAQILDSRMNTKYD | |
| | ENDKLIREVKVITLKSKLVSDFRKDFQFYKVREINTNYHH | |
| | AHDAYLNAVVGTALIKKYPKLESEFVYGDYKVYDVRK | |
| | MIAKSEQEIGKATAKYFFYSNIMNFFKTEITLANGEIRKRP | |
| | LIETNGETGEIVWDKGRDFATVRKVLSMPQVNIVKKTEV | |
| | QTGGFSKESILPKRNSDKLIARKKDWDPKKYGGFDSPTV | |
| | AYSVLVVAKVEKGKSKKLKSVKELLGITIMERSSFEKNPI | |
| | DFLEAKGYKEVKKDLIIKLPKYSLFELENGRKRMLASAG | |
| | ELQKGNELALPSKYVNFLYLASHYEKLKGSPEDNEQKQL | |
| | FVEQHKHYLDEIIEQISEFSKRVILADANLDKVLSAYNKH | |
| | RDKPIREQAENIIHLFTLTNLGAPAAFKYFDTTIDRKRYTS | |
| | TKEVLDATLIHQSITGLYETRIDLSQLGGD | |

[0321] The prime editors described herein may include any of the above SpCas9 sequences, or any variant thereof having at least 80%, at least 85%, at least 90%, at least 95%, or at least 99% sequence identity thereto.

[0322] B. Wild Type Cas9 Orthologs

[0323] In other embodiments, the Cas9 protein can be a wild type Cas9 ortholog from another bacterial species different from the canonical Cas9 from S. pyogenes. For example, the following Cas9 orthologs can be used in connection with the prime editor constructs described in this specification. In addition, any variant Cas9 orthologs having at least 80%, at least 85%, at least 90%, at least 95%, or at least 99% sequence identity to any of the below orthologs may also be used with the present prime editors.

| Description | Sequence |
|---|---|
| LfCas9 | MKEYHIGLDIGTSSIGWAVTDSQFKLMRIKGKTAIGVRLFEEGKTAAERR |
| Lactobacillus | TFRTTRRRLKRRKWRLHYLDEIFAPHLQEVDENFLRRLKQSNIHPEDPTK |
| ferrnentum | NQAFIGKLLFPDLLKKNERGYPTLIKMRDELPVEQRAHYPVMNIYKLRE |
| wild type | AMINEDRQFDLREVYLAVHHIVKYRGHFLNNASVDKFKVGRIDFDKSFN |
| GenBank: | VLNEAYEELQNGEGSFTIEPSKVEKIGQLLLDTKMRKLDRQKAVAKLLE |
| SNX31424.1 | VKVADKEETKRNKQIATAMSKLVLGYKADFATVAMANGNEWKIDLSS |
| 1 | ETSEDEIEKFREELSDAQNDILTEITSLFSQIMLNEIVPNGMSISESMMDRY |
| | WTHERQLAEVKEYLATQPASARKEFDQVYNKYIGQAPKERGFDLEKGL |
| | KKILSKKENWKEIDELLKAGDFLPKQRTSANGVIPHQMHQQELDRIIEKQ |
| | AKYYPWLATENPATGERDRHQAKYELDQLVSFRIPYYVGPLVTPEVQK |
| | ATSGAKFAWAKRKEDGEITPWNLWDKIDRAESAEAFIKRMTVKDTYLL |
| | NEDVLPANSLLYQKYNVLNELNNVRVNGRRLSVGIKQDIYTELFKKKKT |
| | VKASDVASLVMAKTRGVNKPSVEGLSDPKKFNSNLATYLDLKSIVGDK |
| | VDDNRYQTDLENIIEWRSVFEDGEIFADKLTEVEWLTDEQRSALVKKRY |
| | KGWGRLSKKLLTGIVDENGQRIIDLMWNTDQNFKEIVDQPVFKEQIDQL |
| | NQKAITNDGMTLRERVESVLDDAYTSPQNKKAIWQVVRVVEDIVKAVG |
| | NAPKSISIEFARNEGNKGEITRSRRTQLQKLFEDQAHELVKDTSLTEELEK |
| | APDLSDRYYFYFTQGGKDMYTGDPINFDEISTKYDIDHILPQSFVKDNSL |
| | DNRVLTSRKENNKKSDQVPAKLYAAKMKPYWNQLLKQGLITQRKFEN |
| | LTKDVDQNIKYRSLGFVKRQLVETRQVIKLTANILGSMYQEAGTEIIETR |
| | AGLTKQLREEFDLPKVREVNDYHHAVDAYLTTFAGQYLNRRYPKLRSF |
| | FVYGEYMKFKHGSDLKLRNFNFFHELMEGDKSQGKVVDQQTGELITTR |
| | DEVAKSFDRLLNMKYMLVSKEVHDRSDQLYGATIVTAKESGKLTSPIEI |
| | KKNRLVDLYGAYTNGTSAFMTIIKFTGNKPKYKVIGIPTTSAASLKRAGK |
| | PGSESYNQELHRIIKSNPKVKKGFEIVVPHVSYGQLIVDGDCKFTLASPTV |
| | QHPATQLVLSKKSLETISSGYKILKDKPAIANERLIRVFDEVVGQMNRYF |
| | TIFDQRSNRQKVADARDKFLSLPTESKYEGAKKVQVGKTEVITNLLMGL |
| | HANATQGDLKVLGLATFGFFQSTTGLSLSEDTMIVYQSPTGLFERRICLK |
| | DI (SEQ ID NO: 26) |
| SaCas9 | MDKKYSIGLDIGTNSVGWAVITDEYKVPSKKFKVLGNTDRHSIKKNLIG |
| Staphylococcus | ALLFDSGETAEATRLKRTARRRYTRRKNRICYLQEIFSNEMAKVDDSFFH |
| aureus | RLEESFLVEEDKKHERHPlFGNIVDEVAYHEKYPTIYHLRKKLVDSTDKA |
| wild type | DLRLIYLALAHMIKFRGHFLIEGDLNPDNSDVDKLFIQLVQTYNQLFEEN |
| GenB ank: | PINASGVDAKAILSARLSKSRRLENLIAQLPGEKKNGLFGNLIALSLGLTP |
| AYD60528. | NFKSNFDLAEDAKLQLSKDTYDDDLDNLLAQIGDQYADLFLAAKNLSD |
| 1 | AILLSDILRVNTEITKAPLSASMIKRYDEHHQDLTLLKALVRQQLPEKYK |
| | EIFFDQSKNGYAGYIDGGASQEEFYKFIKPILEKMDGTEELLVKLNREDL |
| | LRKQRTFDNGSIPHQIHLGELHAILRRQEDFYPFLKDNREKIEKILTFRIPY |
| | YVGPLARGNSRFAWMTRKSEETITPWNFEEVVDKGASAQSFIERMTNFD |
| | KNLPNEKVLPKHSLLYEYFTVYNELTKVKYVTEGMRKPAFLSGEQKKAI |
| | VDLLFKTNRKVTVKQLKEDYFKKIECFDSVEISGVEDRFNASLGTYHDL |
| | LKIIKDKDFLDNEENEDILEDIVLTLTLFEDREMIEERLKTYAHLFDDKVM |
| | KQLKRRRYTGWGRLSRKLINGIRDKQSGKTILDFLKSDGFANRNFMQLI |
| | HDDSLTFKEDIQKAQVSGQGDSLHEHIANLAGSPAIKKGILQTVKVVDEL |
| | VKVMGRHKPENIVIEMARENQTTQKGQKNSRERMKRIEEGIKELGSQIL |
| | KEHPVENTQLQNEKLYLYYLQNGRDMYVDQELDINRLSDYDVDHIVPQ |
| | SFLKDDSIDNKVLTRSDKNRGKSDNVPSEEVVKKMKNYWRQLLNAKLI |
| | TQRKFDNLTKAERGGLSELDKAGFIKRQLVETRQITKHVAQILDSRMNT |
| | KYDENDKLIREVKVITLKSKLVSDFRKDFQFYKVREINNYHHAHDAYLN |
| | AVVGTALIKKYPKLESEFVYGDYKVYDVRKMIAKSEQEIGKATAKYFFY |
| | SNEVINFFKTEITLANGEIRKRPLIETNGETGEIVWDKGRDFATVRKVLSM |
| | PQVNIVKKTEVQTGGFSKESILPKRNSDKLIARKKDWDPKKYGGFDSPT |
| | VAYSVLVVAKVEKGKSKKLKSVKELLGITIMERSSFEKNPIDFLEAKGYK |
| | EVKKDLIIKLPKYSLFELENGRKRMLASAGELQKGNELALPSKYVNFLY |
| | LASHYEKLKGSPEDNEQKQLFVEQHKHYLDEIIEQISEFSKRVILADANL |
| | DKVLSAYNKHRDKPIREQAENIIHLFTLTNLGAPAAFKYFDTTIDRKRYT |
| | STKEVLDATLIHQSITGLYETRIDLSQLGGD (SEQ ID NO: 27) |
| SaCas9 | MGKRNYILGLDIGITSVGYGIIDYETRDVIDAGVRLFKEANVENNEGRRS |
| Staphylococcus | KRGARRLKRRRRHRIQRVKKLLFDYNLLTDHSELSGINPYEARVKGLSQ |
| aureus | KLSEEEFSAALLHLAKRRGVHNVNEVEEDTGNELSTKEQISRNSKALEE |
| | KYVAELQLERLKKDGEVRGSINRFKTSDYVKEAKQLLKVQKAYHQLDQ |
| | SFIDTYIDLLETRRTYYEGPGEGSPFGWKDIKEWYEMLMGHCTYFPEELR |
| | SVKYAYNADLYNALNDLNNLVITRDENEKLEYYEKFQIIENVFKQKKKP |
| | TLKQIAKEILVNEEDIKGYRVTSTGKPEFTNLKVYHDIKDITARKEIIENA |
| | ELLDQIAKILTIYQSSEDIQEELTNLNSELTQEEIEQISNLKGYTGTHNLSL |
| | KAINLILDELWHTNDNQIAIFNRLKLVPKKVDLSQQKEIPTTLVDDFILSP |
| | VVKRSFIQSIKVINAIIKKYGLPNDIIIELAREKNSKDAQKMINEMQKRNR |
| | QTNERIEEIIRTTGKENAKYLIEKIKLHDMQEGKCLYSLEAIPLEDLLNNP |
| | FNYEVDHIIPRSVSFDNSFNNKVLVKQEENSKKGNRTPFQYLSSSDSKISY |
| | ETFKKHILNLAKGKGRISKTKKEYLLEERDINRFSVQKDFINRNLVDTRY |
| | ATRGLMNLLRSYFRVNNLDVKVKSINGGFTSFLRRKWKFKKERNKGYK |
| | HHAEDALIIANADFIFKEWKKLDKAKKVMENQMFEEKQAESMPEIETEQ |
| | EYKEIFITPHQIKHIKDFKDYKYSHRVDKKPNRKLINDTLYSTRKDDKGN |
| | TLIVNNLNGLYDKDNDKLKKLINKSPEKLLMYHHDPQTYQKLKLIMEQ |
| | YGDEKNPLYKYYEETGNYLTKYSKKDNGPVIKKIKYYGNKLNAHLDIT |
| | DDYPNSRNKVVKLSLKPYRFDVYLDNGVYKFVTVKNLDVIKKENYYEV |
| | NSKCYEEAKKLKKISNQAEFIASFYKNDLIKINGELYRVIGVNNDLLNRIE |
| | VNMIDITYREYLENMNDKRPPHIIKTIASKTQSIKKYSTDILGNLYEVKSK |
| | KHPQIIKK |
| | (SEQ ID NO: 28) |
| StCas9 | MLFNKCIIISINLDFSNKEKCMTKPYSIGLDIGTNSVGWAVITDNYKVPSK |
| Streptococcus | KMKVLGNTSKKYIKKNLLGVLLFDSGITAEGRRLKRTARRRYTRRRNRI |
| thermophilus | LYLQEIFSTEMATLDDAFFQRLDDSFLVPDDKRDSKYPIFGNLVEEKVYH |
| UniProtKB/ | DEFPTIYHLRKYLADSTKKADLRLVYLALAHMIKYRGHFLIEGEFNSKN |
| Swiss-Prot: | NDIQKNFQDFLDTYNAIFESDLSLENSKQLEEIVKDKISKLEKKDRILKLF |
| G3ECR1.2 | PGEKNSGIFSEFLKLIVGNQADFRKCFNLDEKASLHFSKESYDEDLETLL |
| Wild type | GYIGDDYSDVFLKAKKLYDAILLSGFLTVTDNETEAPLSSAMIKRYNEH |
| | KEDLALLKEYIRNISLKTYNEVFKDDTKNGYAGYIDGKTNQEDFYVYLK |
| | NLLAEFEGADYFLEKIDREDFLRKQRTFDNGSIPYQIHLQEMRAILDKQA |
| | KFYPFLAKNKERIEKILTFRIPYYVGPLARGNSDFAWSIRKRNEKITPWNF |
| | EDVIDKESSAEAFINRMTSFDLYLPEEKVLPKHSLLYETFNVYNELTKVR |
| | FIAESMRDYQFLDSKQKKDIVRLYFKDKRKVTDKDIIEYLHAIYGYDGIE |
| | LKGIEKQFNSSLSTYHDLLNIINDKEFLDDSSNEAIIEEIIHTLTIFEDREMIK |
| | QRLSKFENIFDKSVLKKLSRRHYTGWGKLSAKLINGIRDEKSGNTILDYLI |
| | DDGISNRNFMQLIHDDALSFKKKIQKAQIIGDEDKGNIKEVVKSLPGSPAI |
| | KKGILQSIKIVDELVKVMGGRKPESIVVEMARENQYTNQGKSNSQQRLK |
| | RLEKSLKELGSKILKEMPAKLSKIDNNALQNDRLYLYYLQNGKDMYTG |
| | DDLDIDRLSNYDIDHIIPQAFLKDNSIDNKVLVSSASNRGKSDDFPSLEVV |
| | KKRKTFWYQLLKSKLISQRKFDNLTKAERGGLLPEDKAGFIQRQLVETR |
| | QITKHVARLLDEKFNNKKDENNRAVRTVKIITLKSTLVSQFRKDFELYK |
| | VREINDFHHAHDAYLNAVIASALLKKYPKLEPEFVYGDYPKYNSFRERK |
| | SATEKVYFYSNIMNIFKKSISLADGRVIERPLIEVNEETGESVWNKESDLA |
| | TVRRVLSYPQVNVVKKVEEQNHGLDRGKPKGLFNANLSSKPKPNSNEN |
| | LVGAKEYLDPKKYGGYAGISNSFAVLVKGTIEKGAKKKITNVLEFQGISI |
| | LDRINYRKDKLNFLLEKGYKDIELIIELPKYSLFELSDGSRRMLASILSTN |
| | NKRGEIHKGNQIFLSQKFVKLLYHAKRISNTINENHRKYVENHKKEFEEL |
| | FYYILEFNENYVGAKKNGKLLNSAFQSWQNHSIDELCSSFIGPTGSERKG |
| | LFELTSRGSAADFEFLGVKIPRYRDYTPSSLLKDATLIHQSVTGLYETRlD |
| | LAKLGEG(SEQ ID NO: 29) |
| LcCas9 | MKIKNYNLALTPSTSAVGHVEVDDDLNILEPVHHQKAIGVAKFGEGETA |
| Lactobacillus | EARRLARSARRTTKRRANRINHYFNEIMKPEIDKVDPLMFDRIKQAGLSP |
| crispatus | LDERKEFRTVIFDRPNIASYYHNQFPTIWHLQKYLMITDEKADIRLIYWA |
| NCBI | LHSLLKHRGHFFNTTPMSQFKPGKLNLKDDMLALDDYNDLEGLSFAVA |
| Reference | NSPEIEKVIKDRSMHKKEKIAELKKLIVNDVPDKDLAKRNNKIITQIVNAI |
| Sequence: | MGNSFHLNFIFDMDLDKLTSKAWSFKLDDPELDTKFDAISGSMTDNQIGI |
| WP_133478 | FETLQKIYSAISLLDILNGSSNVVDAKNALYDKHKRDLNLYFKFLNTLPD |
| 044.1 | EIAKTLKAGYTLYIGNRKKDLLAARKLLKVNVAKNFSQDDFYKLINKEL |
| Wild type | KSIDKQGLQTRFSEKVGELVAQNNFLPVQRSSDNVFlPYQLNAITFNKILE |
| | NQGKYYDFLVKPNPAKKDRKNAPYELSQLMQFTIPYYVGPLVTPEEQV |
| | KSGIPKTSRFAWMVRKDNGAITPWNFYDKVDIEATADKFIKRSIAKDSY |
| | LLSELVLPKHSLLYEKYEVFNELSNVSLDGKKLSGGVKQILFNEVFKKTN |
| | KVNTSRILKALAKHNIPGSKITGLSNPEEFTSSLQTYNAWKKYFPNQIDNF |
| | AYQQDLEKMIEWSTVFEDHKILAKKLDEIEWLDDDQKKFVANTRLRGW |
| | GRLSKRLLTGLKDNYGKSIIVIQRLETTKANFQQIVYKPEFREQIDKISQAA |
| | AKNQSLEDILANSYTSPSNRKAIRKTMSVVDEYIKLNHGKEPDKIFLMFQ |
| | RSEQEKGKQTEARSKQLNRILSQLKADKSANKLFSKQLADEFSNAIKKS |
| | KYKLNDKQYFYFQQLGRDALTGEVIDYDELYKYTVLHIIPRSKLTDDSQ |
| | NNKVLTKYKIVDGSVALKFGNSYSDALGMPIKAFWTELNRLKLIPKGKL |
| | LNLTTDFSTLNKYQRDGYIARQLVETQQIVKLLATIMQSRFKHTKIIEVR |
| | NSQVANIRYQFDYFRIKNLNEYYRGFDAYLAAVVGTYLYKVYPKARRL |
| | FVYGQYLKPKKTNQENQDMHLDSEKKSQGFNFLWNLLYGKQDQIFVN |
| | GTDVIAFNRKDLITKMNTVYNYKSQKISLAIDYHNGAMFKATLFPRNDR |
| | DTAKTRKLIPKKKDYDTDIYGGYTSNVDGYMLLAEIIKRDGNKQYGFYG |
| | VPSRLVSELDTLKKTRYTEYEEKLKEIIKPELGVDLKKIKKIKILKNKVPF |
| | NQVIIDKGSKFFITSTSYRWNYRQLILSAESQQTLMDLVVDPDFSNHKAR |
| | KDARKNADERLIKVYEEILYQVKNYMPMFVELHRCYEKLVDAQKTFKS |
| | LKISDKAMVLNQILILLHSNATSPVLEKLGYHTRFTLGKKHNLISENAVL |
| | VTQSITGLKENHVSIKQML (SEQ ID NO: 30) |
| PdCas9 | MTNEKYSIGLDIGTSSIGFAVVNDNNRVIRVKGKNAIGVRLFDEGKAAA |
| Pedicoccus | DRRSFRTTRRSFRTTRRRLSRRRWRLKLLREIFDAYITPVDEAFFIRLKES |
| damnosus | NLSPKDSKKQYSGDILFNDRSDKDFYEKYPTIYHLRNALMTEHRKFDVR |
| NCBI | EIYLAIHHIMKFRGHFLNATPANNFKVGRLNLEEKFEELNDIYQRVFPDE |
| Reference | SIEFRTDNLEQIKEVLLDNKRSRADRQRTLVSDIYQSSEDKDIEKRNKAV |
| Sequence: | ATEILKASLGNKAKLNVITNVEVDKEAAKEWSITFDSESIDDDLAKIEGQ |
| WP_062913 | MTDDGHEIIEVLRSLYSGITLSAIVPENHTLSQSMVAKYDLHKDHLKLFK |
| 273.1 | KLINGMTDTKKAKNLRAAYDGYIDGVKGKVLPQEDFYKQVQVNLDDS |
| Wild type | AEANEIQTYIDQDIFMPKQRTKANGSIPHQLQQQELDQIIENQKAYYPWL |
| | AELNPNPDKKRQQLAKYKLDELVTFRVPYYVGPMITAKDQKNQSGAEF |
| | AWMIRKEPGNITPWNFDQKVDRMATANQFIKRMTTTDTYLLGEDVLPA |
| | QSLLYQKFEVLNELNKIRIDHKPISIEQKQQIFNDLFKQFKNVTIKHLQDY |
| | LVSQGQYSKRPLIEGLADEKRFNSSLSTYSDLCGIFGAKLVEENDRQEDL |
| | EKIIEWSTIFEDKKIYRAKLNDLTWLTDDQKEKLATKRYQGWGRLSRKL |
| | LVGLKNSEHRNIMDILWITNENFMQIQAEPDFAKLVTDANKGMLEKTDS |
| | QDVINDLYTSPQNKKAIRQILLVVHDIQNAMHGQAPAKIHVEFARGEER |
| | NPRRSVQRQRQVEAAYEKVSNELVSAKVRQEFKEAINNKRDFKDRLFL |
| | YFMQGGIDIYTGKQLNIDQLSSYQIDHILPQAFVKDDSLTNRVLTNENQV |
| | KADSVPIDIFGKKMLSVWGRMKDQGLISKGKYRNLTMNPENISAHTENG |
| | FINRQLVETRQVIKLAVNILADEYGDSTQIISVKADLSHQMREDFELLKN |
| | RDVNDYHHAFDAYLAAFIGNYLLKRYPKLESYFVYGDFKKFTQKETKM |
| | RRFNFIYDLKHCDQVVNKETGEILWTKDEDIKYIRHLFAYKKILVSHEVR |
| | EKRGALYNQTIYKAKDDKGSGQESKKLIRIKDDKETKIYGGYSGKSLAY |
| | MTIVQITKKNKVSYRVIGIPTLALARLNKLENDSTENNGELYKIIKPQFTH |
| | YKVDKKNGEIIETTDDFKIVVSKVRFQQLIDDAGQFFMLASDTYKNNAQ |
| | QLVISNNALKAINNTNITDCPRDDLERLDNLRLDSAFDEIVKKMDKYFSA |
| | YDANNFREKIRNSNLIFYQLPVEDQWENNKITELGKRTVLTRILQGLHAN |
| | ATTTDMSIFKIKTPFGQLRQRSGISLSENAQLIYQSPTGLFERRVQLNKIK |
| | (SEQ ID NO: 31) |
| FnCas9 | MKKQKFSDYYLGFDIGTNSVGWCVTDLDYNVLRFNKKDMWGSRLFEE |
| Fusobaterium | AKTAAERRVQRNSRRRLKRRKWRLNLLEEIFSNEILKIDSNFFRRLKESSL |
| nucleatum | WLEDKSSKEKFTLFNDDNYKDYDFYKQYPTIFHLRNELIKNPEKKIARLV |
| NCBI | YLAIHSIFKSRGHFLFEGQNLKEIKNFETLYNNLIAFLEDNGINKIIDKNNI |
| Reference | EKLEKIVCDSKKGLKDKEKEFKEIFNSDKQLVAIFKLSVGSSVSLNDLFD |
| Sequence: | TDEYKKGEVEKEKISFREQIYEDDKPIYYSILGEKIELLDIAKTFYDFMVL |
| WP_060798 | NNILADSQYISEAKVKLYEEHKKDLKNLKYIIRKYNKGNYDKLFKDKNE |
| 984.1 | NNYSAYIGLNKEKSKKEVIEKSRLKIDDLIKNIKGYLPKVEEIEEKDKAIF |
| | NKILNKIELKTILPKQRISDNGTLPYQIHEAELEKILENQSKYYDFLNYEE |
| | NGIITKDKLLMTFKFRIPYYVGPLNSYHKDKGGNSWIVRKEEGKILPWNF |
| | EQKVDIEKSAEEFIKRMTNKCTYLNGEDVIPKDTFLYSEYVILNELNKVQ |
| | VNDEFLNEENKRKIIDELFKENKKVSEKKFKEYLLVKQIVDGTIELKGVK |
| | DSFNSNYISYIRFKDIFGEKLNLDIYKEISEKSILWKCLYGDDKKIFEKKIK |
| | NEYGDILTKDEIKKINTFKFNNWGRLSEKLLTGIEFINLETGECYSSVMDA |
| | LRRTNYNLMELLSSKFTLQESINNENKEMNEASYRDLIEESYVSPSLKRAI |
| | FQTLKIYEEIRKITGRVPKKVFIEMARGGDESMKNKKIPARQEQLKKLYD |
| | SCGNDIANFSIDIKEMKNSLISYDNNSLRQKKLYLYYLQFGKCMYTGREI |
| | DLDRLLQNNDTYDIDHIYPRSKVIKDDSFDNLVLVLKNENAEKSNEYPV |
| | KKEIQEKMKSFWRFLKEKNFISDEKYKRLTGKDDFELRGFMARQLVNV |
| | RQTTKEVGKILQQIEPEIKIVYSKAEIASSFREMFDFIKVRELNDTHHAKD |
| | AYLNIVAGNVYNTKFTEKPYRYLQEIKENYDVKKIYNYDIKNAWDKEN |
| | SLEIVKKNMEKNTVNITRFIKEKKGQLFDLNPIKKGETSNEIISIKPKVYN |
| | GKDDKLNEKYGYYKSLNPAYFLYVEHKEKNKRIKSFERVNLVDVNNIK |
| | DEKSLVKYLIENKKLVEPRVIKKVYKRQVILINDYPYSIVTLDSNKLMDF |
| | ENLKPLFLENKYEKILKNVIKFLEDNQGKSEENYKFIYLKKKDRYEKNET |
| | LESVKDRYNLEFNEMYDKFLEKLDSKDYKNYMNNKKYQELLDVKEKFI |
| | KLNLFDKAFTLKSFLDLFNRKTMADFSKVGLTKYLGKIQKISSNVLSKNE |
| | LYLLEESVTGLFVKKIKL (SEQ ID NO: 32) |
| EcCas9 | RRKQRIQILQELLGEEVLKTDPGFFHRMKESRYVVEDKRTLDGKQVELP |
| Enterococcus | YALFVDKDYTDKEYYKQFPTINHLIVYLMTTSDTPDIRLVYLALHYYMK |
| cecorum | NRGNFLHSGDINNVKDINDILEQLDNVLETFLDGWNLKLKSYVEDIKNIY |
| NCBI | NRDLGRGERKKAFVNTLGAKTKAEKAFCSLISGGSTNLAELFDDSSLKEI |
| Reference | ETPKIEFASSSLEDKIDGIQEALEDRFAVIEAAKRLYDWKTLTDILGDSSS |
| Sequence: | LAEARVNSYQMHHEQLLELKSLVKEYLDRKVFQEVFVSLNVANNYPAY |
| WP_047338 | IGHTKINGKKKELEVKRTKRNDFYSYVKKQVIEPIKKKVSDEAVLTKLSE |
| 501.1 | IESLIEVDKYLPLQVNSDNGVIPYQVKLNELTRIFDNLENRIPVLRENRDK |
| Wild type | IIKTFKFRIPYYVGSLNGVVKNGKCTNWMVRKEEGKIYPWNFEDKVDLE |
| | ASAEQFIRRMTNKCTYLVNEDVLPKYSLLYSKYLVLSELNNLRIDGRPLD |
| | VKIKQDIYENVFKKNRKVTLKKIKKYLLKEGIITDDDELSGLADDVKSSL |
| | TAYRDFKEKLGHLDLSEAQMENIILNITLFGDDKKLLKKRLAALYPFIDD |
| | KSLNRIATLNYRDWGRLSERFLSGITSVDQETGELRTIIQCMYETQANLM |
| | QLLAEPYHFVEAIEKENPKVDLESISYRIVNDLYVSPAVKRQIWQTLLVIK |
| | DIKQVMKHDPERIFIEMAREKQESKKTKSRKQVLSEVYKKAKEYEHLFE |
| | KLNSLTEEQLRSKKIYLYFTQLGKCMYSGEPIDFENLVSANSNYDIDHIYP |
| | QSKTIDDSFNNIVLVKKSLNAYKSNHYPIDKNIRDNEKVKTLWNTLVSK |
| | GLITKEKYERURSTPFSDEELAGFIARQLVETRQSTKAVAEILSNWFPESE |
| | IVYSKAKNVSNFRQDFEILKVRELNDCHHAHDAYLNIVVGNAYHTKFTN |
| | SPYRFIKNKANQEYNLRKLLQKVNKIESNGVVAWVGQSENNPGTIATVK |
| | KVIRRNTVLISRMVKEVDGQLFDLTLMKKGKGQVPIKSSDERLTDISKY |
| | GGYNKATGAYFTFVKSKKRGKVVRSFEYVPLHLSKQFENNNELLKEYIE |
| | KDRGLTDVEILIPKVLINSLFRYNGSLVRITGRGDTRLLLVHEQPLYVSNS |
| | FVQQLKSVSSYKLKKSENDNAKLTKTATEKLSNIDELYDGLLRKLDLPIY |
| | SYWFSSIKEYLVESRTKYIKLSIEEKALVIFEILHLFQSDAQVPNLKILGLS |
| | TKPSRlRIQKNLKDTDKMSIIHQSPSGIFEHEIELTSL (SEQ ID NO: 33) |
| AhCas9 | MQNGFLGITVSSEQVGWAVTNPKYELERASRKDLWGVRLFDKAETAED |
| Anaerostipes | RRMFRTNRRLNQRKKNRIHYLRDIFHEEVNQKDPNFFQQLDESNFCEDD |
| hadrus | RTVEFNFDTNLYKNQFPTVYHLRKYLMETKDKPIARLVYLAFSKFMKN |
| NCBI | RGHFLYKGNLGEVMDFENSMKGFCESLEKFNIDFPTLSDEQVKEVRDIL |
| Reference | CDHKIAKTVKKKNIITITKVKSKTAKAWIGLFCGCSVPVKVLFQDIDEEIV |
| Sequence: | TDPEKISFEDASYDDYIANIEKGVGIYYEAIVSAKMLFDWSILNEILGDHQ |
| WP_044924 | LLSDAMIAEYNKHHDDLKRLQKIIKGTGSRELYQDIFINDVSGNYVCYV |
| 278.1 | GHAKTMSSADQKQFYTFLKNRLKNVNGISSEDAEWIDTEIKNGTLLPKQ |
| Wild type | TKRDNSVIPHQLQLREFELILDNMQEMYPFLKENREKLLKIFNFVIPYYV |
| | GPLKGVVRKGESTNWMVPKKDGVIHPWNFDEMVDKEASAECFISRMT |
| | GNCSYLFNEKVLPKNSLLYETFEVLNELNPLKINGEPISVELKQRIYEQLF |
| | LTGKKVTKKSLTKYLIKNGYDKDIELSGIDNEFHSNLKSHIDFEDYDNLS |
| | DEEVEQIILRITVFEDKQLLKDYLNREFVKLSEDERKQICSLSYKGWGNL |
| | SEMLLNGITVTDSNGVEVSVMDMLWNTNLNLMQILSKKYGYKAEIEHY |
| | NKEHEKTIYNREDLMDYLNIPPAQRRKVNQLITIVKSLKKTYGVPNKIFF |
| | KISREHQDDPKRTSSRKEQLKYLYKSLKSEDEKHLMKELDELNDHELSN |
| | DKVYLYFLQKGRCIYSGKKLNLSRLRKSNYQNDIDYIYPLSAVNDRSMN |
| | NKVLTGIQENRADKYTYFPVDSEIQKKMKGFWMELVLQGFMTKEKYFR |
| | LSRENDFSKSELVSFIEREISDNQQSGRMIASVLQYYFPESKIVFVKEKLIS |
| | SFKRDFHLISSYGHNHLQAAKDAYITIVVGNVYHTKFTMDPAIYFKNHK |
| | RKDYDLNRLFLENISRDGQIAWESGPYGSIQTVRKEYAQNHIAVTKRVV |
| | EVKGGLFKQMPLKKGHGEYPLKTNDPRFGNIAQYGGYTNVTGSYFVLV |
| | ESMEKGKKRISLEYVPVYLHERLEDDPGHKLLKEYLVDHRKLNHPKILL |
| | AKVRKNSLLKIDGFYYRLNGRSGNALILTNAVELIMDDWQTKTANKISG |
| | YMKRRAIDKKARVYQNEFHIQELEQLYDFYLDKLKNGVYKNRKNNQA |
| | ELIHNEKEQFMELKTEDQCVLLTEIKKLFVCSPMQADLTLIGGSKHTGMI |
| | AMSSNVTKADFAVIAEDPLGLRNKVIYSHKGEK (SEQ ID NO: 34) |
| KvCas9 | MSQNNNKIYNIGLDIGDASVGWAVVDEHYNLLKRHGKHMWGSRLFTQ |
| Kandleria | ANTAVERRSSRSTRRRYNKRRERIRLLREIMEDMVLDVDPTFFIRLANVS |
| vitulina | FLDQEDKKDYLKENYHSNYNLFIDKDFNDKTYYDKYPTIYHLRKHLCES |
| NCBI | KEKEDPRLIYLALHHIVKYRGNFLYEGQKFSMDVSNIEDKMIDVLRQFN |
| Reference | EINLFEYVEDRKKIDEVLNVLKEPLSKKHKAEKAFALFDTTKDNKAAYK |
| Sequence: | ELCAALAGNKFNVTKMLKEAELHDEDEKDISFKFSDATFDDAFVEKQPL |
| WP_031589 | LGDCVEFIDLLHDIYSWVELQNILGSAHTSEPSISAAMIQRYEDHKNDLK |
| 969.1 | LLKDVIRKYLPKKYFEVFRDEKSKKNNYCNYINHPSKTPVDEFYKYIKK |
| Wild type | LIEKIDDPDVKTILNKIELESFMLKQNSRTNGAVPYQMQLDELNKILENQ |
| | SVYYSDLKDNEDKIRSILTFRIPYYFGPLNITKDRQFDWIIKKEGKENERIL |
| | PWNANEIVDVDKTADEFIKRMRNFCTYFPDEPVMAKNSLTVSKYEVLN |
| | EINKLRINDHLIKRDMKDKMLHTLFMDHKSISANAMKKWLVKNQYFSN |
| | TDDIKIEGFQKENACSTSLTPWIDFTKIFGKINESNYDFIEKIIYDVTVFED |
| | KKILRRRLKKEYDLDEEKIKKILKLKYSGWSRLSKKLLSGIKTKYKDSTR |
| | TPETVLEVMERTNMNLMQVINDEKLGFKKTIDDANSTSVSGKFSYAEVQ |
| | ELAGSPAIKRGIWQALLIVDEIKKIMKHEPAHVYIEFARNEDEKERKDSF |
| | VNQMLKLYKDYDFEDETEKEANKHLKGEDAKSKIRSERLKLYYTQMG |
| | KCMYTGKSLDIDRLDTYQVDHIVPQSLLKDDSIDNKVLVLSSENQRKLD |
| | DLVIPSSIRNKMYGFWEKLFNNKIISPKKFYSLIKTEFNEKDQERFINRQIV |
| | ETRQITKHVAQIIDNHYENTKVVTVRADLSHQFRERYHIYKNRDINDFHH |
| | AHDAYIATILGTYIGHRFESLDAKYIYGEYKRIFRNQKNKGKEMKKNND |
| | GFILNSMRNIYADKDTGEIVWDPNYIDRIKKCFYYKDCFVTKKLEENNG |
| | TFFNVTVLPNDTNSDKDNTLATVPVNKYRSNVNKYGGFSGVNSFIVAIK |
| | GKKKKGKKVIEVNKLTGIPLMYKNADEEIKINYLKQAEDLEEVQIGKEIL |
| | KNQLIEKDGGLYYIVAPTEIINAKQLILNESQTKLVCEIYKAMKYKNYDN |
| | LDSEKIIDLYRLLINKMELYYPEYRKQLVKKFEDRYEQLKVISIEEKCNII |
| | KQILATLHCNSSIGKIMYSDFKISTTIGRLNGRTISLDDISFIAESPTGMYSK |
| | KYKL (SEQ ID NO: 35) |
| EfCas9 | MRLFEEGHTAEDRRLKRTARRRIRRRNRLRYLQAFFEEAMTDLDENFF |
| Enterococcus | ARLQESFLVPEDKKWHRHPIFAKLEDEVAYHETYPTIYHLRKKLADSSE |
| faecalis | QADLRLIYLALAHIVKYRGHFLIEGKLSTENTSVKDQFQQFMVIYNQTFV |
| NCBI | NGESRLVSAPLPESVLIEEELTEKASRTKKSEKVLQQFPQEKANGLFGQF |
| Reference | LKLMVGNKADFKKVFGLEEEAKITYASESYEEDLEGILAKVGDEYSDVF |
| Sequence: | LAAKNVYDAVELSTILADSDKKSHAKLSSSMIVRFTEHQEDLKKFKRFIR |
| WP_016631 | ENCPDEYDNLFKNEQKDGYAGYIAHAGKVSQLKFYQYVKKIIQDIAGAE |
| 044.1 | YFLEKIAQENFLRKQRTFDNGVIPHQIHLAELQAIIHRQAAYYPFLKENQE |
| Wild type | KIEQLVTFRIPYYVGPLSKGDASTFAWLKRQSEEPIRPWNLQETVDLDQS |
| | ATAFIERMTNFDTYLPSEKVLPKHSLLYEKFMVFNELTKISYTDDRGIKA |
| | NFSGKEKEKIFDYLFKTRRKVKKKDIIQFYRNEYNTEIVTLSGLEEDQFN |
| | ASFSTYQDLLKCGLTRAELDHPDNAEKLEDIIKILTIFEDRQRIRTQLSTFK |
| | GQFSAEVLKKLERKHYTGWGRLSKKLINGIYDKESGKTILDYLVKDDGV |
| | SKHYNRNFMQLINDSQLSFKNAIQKAQSSEHEETLSETVNELAGSPAIKK |
| | GIYQSLKIVDELVAIMGYAPKRIVVEMARENQTTSTGKRRSIQRLKIVEK |
| | AMAEIGSNLLKEQPTTNEQLRDTRLFLYYMQNGKDMYTGDELSLHRLS |
| | HYDIDHIIPQSFMKDDSLDNLVLVGSTENRGKSDDVPSKEVVKDMKAY |
| | WEKLYAAGLISQRKFQRLTKGEQGGLTLEDKAHFIQRQLVETRQITKNV |
| | AGILDQRYNAKSKEKKVQIITLKASLTSQFRSIFGLYKVREVNDYHHGQD |
| | AYLNCVVATTLLKVYPNLAPEFVYGEYPKFQTFKENKATAKAIIYTNLL |
| | RFFTEDEPRFTKDGEILWSNSYLKTIKKELNYHQMNIVKKVEVQKGGFS |
| | KESIKPKGPSNKLIPVKNGLDPQKYGGFDSPVVAYTVLFTHEKGKKPLIK |
| | QEILGITIMEKTRFEQNPILFLEEKGFLRPRVLMKLPKYTLYEFPEGRRRL |
| | LASAKEAQKGNQMVLPEHLLTLLYHAKQCLLPNQSESLAYVEQHQPEF |
| | QEILERVVDFAEVHTLAKSKVQQIVKLFEANQTADVKEIAASFIQLMQFN |
| | AMGAPSTFKFFQKDIERARYTSIKEIFDATIIYQSPTGLYETRRKVVD |
| | (SEQ ID NO: 36) |
| Staphylococcus | KRNYILGLDIGITSVGYGIIDYETRDVIDAGVRLFKEANVENNEGRRSKR |
| aureus | GARRLKRRRRHRIQRVKKLLFDYNLLTDHSELSGINPYEARVKGLSQKL |
| Cas9 | SEEEFSAALLHLAKRRGVHNVNEVEEDTGNELSTKEQISRNSKALEEKY |
| | VAELQLERLKKDGEVRGSINRFKTSDYVKEAKQLLKVQKAYHQLDQSFI |
| | DTYIDLLETRRTYYEGPGEGSPFGWKDIKEWYEMLMGHCTYFPEELRSV |
| | KYAYNADLYNALNDLNNLVITRDENEKLEYYEKFQIIENVFKQKKKPTL |
| | KQIAKEILVNEEDIKGYRVTSTGKPEFTNLKVYHDIKDITARKEIIENAEL |
| | LDQIAKILTIYQSSEDIQEELTNLNSELTQEEIEQISNLKGYTGTHNLSLKAI |
| | NLILDELWHTNDNQIAIFNRLKLVPKKVDLSQQKEIPTTLVDDFILSPVVK |
| | RSFIQSIKVINAIIKKYGLPNDIIIELAREKNSKDAQKMINEMQKRNRQTN |
| | ERIEEIIRTTGKENAKYLIEKIKLHDMQEGKCLYSLEAIPLEDLLNNPFNY |
| | EVDHIIPRSVSFDNSFNNKVLVKQEENSKKGNRTPFQYLSSSDSKISYETF |
| | KKHILNLAKGKGRISKTKKEYLLEERDINRFSVQKDFINRNLVDTRYATR |
| | GLMNLLRSYFRVNNLDVKVKSINGGFTSFLRRKWKFKKERNKGYKHHA |
| | EDALIIANADFIFKEWKKLDKAKKVMENQMFEEKQAESMPEIETEQEYK |
| | EIFITPHQIKHIKDFKDYKYSHRVDKKPNRELINDTLYSTRKDDKGNTLIV |
| | NNLNGLYDKDNDKLKKLINKSPEKLLMYHHDPQTYQKLKLIMEQYGDE |
| | KNPLYKYYEETGNYLTKYSKKDNGPVIKKIKYYGNKLNAHLDITDDYP |
| | NSRNKVVKLSLKPYRFDVYLDNGVYKFVTVKNLDVIKKENYYEVNSKC |
| | YEEAKKLKKISNQAEFIASFYNNDLIKINGELYRVIGVNNDLLNRIEVNMI |
| | DITYREYLENMNDKRPPRIIKTIASKTQSIKKYSTDILGNLYEVKSKKHPQ |
| | IIKKG |
| | (SEQ ID NO: 37) |
| Geobacillus | MKYKIGLDIGITSIGWAVINLDIPRIEDLGVRIFDRAENPKTGESLALPRRL |
| therrnodenit | ARSARRRLRRRKHRLERIRRLFVREGILTKEELNKLFEKKHEIDVWQLRV |
| rificans | EALDRKLNNDELARILLHLAKRRGFRSNRKSERTNKENSTMLKHIEENQ |
| Cas9 | SILSSYRTVAEMVVKDPKFSLHKRNKEDNYTNTVARDDLEREIKLIFAKQ |
| | REYGNIVCTEAFEHEYISIWASQRPFASKDDIEKKVGFCTFEPKEKRAPK |
| | ATYTFQSFTVWEHINKLRLVSPGGIRALTDDERRLIYKQAFHKNKITFHD |
| | VRTLLNLPDDTRFKGLLYDRNTTLKENEKVRFLELGAYHKIRKAIDSVY |
| | GKGAAKSFRPIDFDTFGYALTMFKDDTDIRSYLRNEYEQNGKRMENLA |
| | DKVYDEELIEELLNLSFSKFGHLSLKALRNILPYMEQGEVYSTACERAGY |
| | TFTGPKKKQKTVLLPNIPPIANPVVMRALTQARKVVNAIIKKYGSPVSIHI |
| | ELARELSQSFDERRKMQKEQEGNRKKNETAIRQLVEYGLTLNPTGLDIV |
| | KFKLWSEQNGKCAYSLQPIEIERLLEPGYTEVDHVIPYSRSLDDSYTNKV |
| | LVLTKENREKGNRTPAEYLGLGSERWQQFETFVLTNKQFSKKKRDRLLR |
| | LHYDENEENEFKNRNLNDTRYISRFLANFIREHLKFADSDDKQKVYTVN |
| | GRITAHLRSRWNFNKNREESNLHHAVDAAIVACTTPSDIARVTAFYQRR |
| | EQNKELSKKTDPQFPQPWPHFADELQARLSKNPKESIKALNLGNYDNEK |
| | LESLQPVFVSRMPKRSITGAAHQETLRRYIGIDERSGKIQTVVKKKLSEIQ |
| | LDKTGHFPMYGKESDPRTYEAIRQRLLEHNNDPKKAFQEPLYKPKKNGE |
| | LGPIIRTIKIIDTTNQVIPLNDGKTVAYNSNIVRVDVFEKDGKYYCVPIYTI |
| | DMMKGILPNKAIEPNKPYSEWKEMTEDYTFRFSLYPNDLIRIEFPREKTIK |
| | TAVGEEIKIKDLFAYYQTIDSSNGGLSLVSHDNNFSLRSIGSRTLKRFEKY |
| | QVDVLGNIYKVRGEKRVGVASSSHSKAGETIRPL |
| | (SEQ ID NO: 38) |
| ScCas9 | MEKKYSIGLDIGTNSVGWAVITDDYKVPSKKFKVLGNTNRKSIKKNLM |
| S. canis | GALLFDSGETAEATRLKRTARRRYTRRKNRIRYLQEIFANEMAKLDDSF |
| 1375 AA | FQRLEESFLVEEDKKNERHPIFGNLADEVAYHRNYPTIYHLRKKLADSPE |
| 159.2 kDa | KADLRLIYLALAHIIKFRGHFLIEGKLNAENSDVAKLFYQLIQTYNQLFEE |
| | SPLDEIEVDAKGILSARLSKSKRLEKLIAVFPNEKKNGLFGNIIALALGLTP |
| | NFKSNFDLTEDAKLQLSKDTYDDDLDELLGQIGDQYADLFSAAKNLSDA |
| | ILLSDILRSNSEVTKAPLSASMVKRYDEHHQDLALLKTLVRQQFPEKYAE |
| | IFKDDTKNGYAGYVGIGIKHRKRTTKLATQEEFYKFIKPILEKMDGAEEL |
| | LAKLNRDDLLRKQRTFDNGSIPHQIHLKELHAILRRQEEFYPFLKENREKI |
| | EKILTFRIPYYVGPLARGNSRFAWLTRKSEEAITPWNFEEVVDKGASAQS |
| | FIERMTNFDEQLPNKKVLPKHSLLYEYFTVYNELTKVKYVTERMRKPEF |
| | LSGEQKKAIVDLLFKTNRKVTVKQLKEDYFKKIECFDSVEIIGVEDRFNA |
| | SLGTYHDLLKIIKDKDFLDNEENEDILEDIVLTLTLFEDREMIEERLKTYA |
| | HLFDDKVMKQLKRRHYTGWGRLSRKMINGIRDKQSGKTILDFLKSDGF |
| | SNRNFMQLIHDDSLTFKEEIEKAQVSGQGDSLHEQIADLAGSPAIKKGIL |
| | QTVKIVDELVKVMGHKPENIVIEMARENQTTTKGLQQSRERKKRIEEGIK |
| | ELESQILKENPVENTQLQNEKLYLYYLQNGRDMYVDQELDINRLSDYDV |
| | DHIVPQSFIKDDSIDNKVLTRSVENRGKSDNVPSEEVVKKMKNYWRQLL |
| | NAKLITQRKFDNLTKAERGGLSEADKAGFIKRQLVETRQITKHVARILDS |
| | RMNTKRDKNDKPIREVKVITLKSKLVSDFRKDFQLYKVRDINNYHHAH |
| | DAYLNAVVGTALIKKYPKLESEFVYGDYKVYDVRKMIAKSEQEIGKAT |
| | AKRFFYSNIMNFFKTEVKLANGEIRKRPLIETNGETGEVVWNKEKDFAT |
| | VRKVLAMPQVNIVKKTEVQTGGFSKESILSKRESAKLIPRKKGWDTRKY |
| | GGFGSPTVAYSILVVAKVEKGKAKKLKSVKVLVGITIMEKGSYEKDPIGF |
| | LEAKGYKDIKKELIFKLPKYSLFELENGRRRMLASATELQKANELVLPQ |
| | HLVRLLYYTQNISATTGSNNLGYIEQHREEFKEIFEKIIDFSEKYILKNKV |
| | NSNLKSSFDEQFAVSDSILLSNSFVSLLKYTSFGASGGFTFLDLDVKQGRL |
| | RYQTVTEVLDATLIYQSITGLYETRTDLSQLGGD(SEQ ID NO: 39) |

[0324] The prime editors described herein may include any of the above Cas9 ortholog sequences, or any variants thereof having at least 80%, at least 85%, at least 90%, at least 95%, or at least 99% sequence identity thereto.

[0325] The napDNAbp may include any suitable homologs and/or orthologs or naturally occurring enzymes, such as, Cas9. Cas9 homologs and/or orthologs have been described in various species, including, but not limited to, S. pyogenes and S. thermophilus. Preferably, the Cas moiety is configured (e.g, mutagenized, recombinantly engineered, or otherwise obtained from nature) as a nickase, i.e., capable of cleaving only a single strand of the target doubpdditional suitable Cas9 nucleases and sequences will be apparent to those of skill in the art based on this disclosure, and such Cas9 nucleases and sequences include Cas9 sequences from the organisms and loci disclosed in Chylinski, Rhun, and Charpentier, “The tracrRNA and Cas9 families of type II CRISPR-Cas immunity systems” (2013) RNA Biology 10:5, 726-737; the entire contents of which are incorporated herein by reference. In some embodiments, a Cas9 nuclease has an inactive (e.g., an inactivated) DNA cleavage domain, that is, the Cas9 is a nickase. In some embodiments, the Cas9 protein comprises an amino acid sequence that is at least 80% identical to the amino acid sequence of a Cas9 protein as provided by any one of the variants of Table 3. In some embodiments, the Cas9 protein comprises an amino acid sequence that is at least 85%, at least 90%, at least 92%, at least 95%, at least 96%, at least 97%, at least 98%, at least 99%, or at least 99.5% identical to the amino acid sequence of a Cas9 protein as provided by any one of the Cas9 orthologs in the above tables.

[0326] C. Dead Cas9 Variant

[0327] In certain embodiments, the prime editors described herein may include a dead Cas9, e.g., dead SpCas9, which has no nuclease activity due to one or more mutations that inactive both nuclease domains of Cas9, namely the RuvC domain (which cleaves the non-protospacer DNA strand) and HNH domain (which cleaves the protospacer DNA strand). The nuclease inactivation may be due to one or mutations that result in one or more substitutions and/or deletions in the amino acid sequence of the encoded protein, or any variants thereof having at least 80%, at least 85%, at least 90%, at least 95%, or at least 99% sequence identity thereto.

[0328] As used herein, the term “dCas9” refers to a nuclease-inactive Cas9 or nuclease-dead Cas9, or a functional fragment thereof, and embraces any naturally occurring dCas9 from any organism, any naturally-occurring dCas9 equivalent or functional fragment thereof, any dCas9 homolog, ortholog, or paralog from any organism, and any mutant or variant of a dCas9, naturally-occurring or engineered. The term dCas9 is not meant to be particularly limiting and may be referred to as a “dCas9 or equivalent.” Exemplary dCas9 proteins and method for making dCas9 proteins are further described herein and/or are described in the art and are incorporated herein by reference.

[0329] In other embodiments, dCas9 corresponds to, or comprises in part or in whole, a Cas9 amino acid sequence having one or more mutations that inactivate the Cas9 nuclease activity. In other embodiments, Cas9 variants having mutations other than D10A and H840A are provided which may result in the full or partial inactivate of the endogneous Cas9 nuclease acivity (e.g., nCas9 or dCas9, respectively). Such mutations, by way of example, include other amino acid substitutions at D10 and H820, or other substitutions within the nuclease domains of Cas9 (e.g., substitutions in the HNH nuclease subdomain and/or the RuvC1 subdomain) with reference to a wild type sequence such as Cas9 from Streptococcus pyogenes (NCBI Reference Sequence: NC_017053.1). In some embodiments, variants or homologues of Cas9 (e.g., variants of Cas9 from Streptococcus pyogenes (NCBI Reference Sequence: NC_017053.1 (SEQ ID NO: 20))) are provided which are at least about 70% identical, at least about 80% identical, at least about 90% identical, at least about 95% identical, at least about 98% identical, at least about 99% identical, at least about 99.5% identical, or at least about 99.9% identical to NCBI Reference Sequence: NC_017053.1. In some embodiments, variants of dCas9 (e.g., variants of NCBI Reference Sequence: NC_017053.1 (SEQ ID NO: 20)) are provided having amino acid sequences which are shorter, or longer than NC_017053.1 (SEQ ID NO: 20) by about 5 amino acids, by about 10 amino acids, by about 15 amino acids, by about 20 amino acids, by about 25 amino acids, by about 30 amino acids, by about 40 amino acids, by about 50 amino acids, by about 75 amino acids, by about 100 amino acids or more.

[0330] In one embodiment, the dead Cas9 may be based on the canonical SpCas9 sequence of Q99ZW2 and may have the following sequence, which comprises a D10X and an H810X, wherein X may be any amino acid, substitutions (underlined and bolded), or a variant be variant of SEQ ID NO: 40 having at least 80%, at least 85%, at least 90%, at least 95%, or at least 99% sequence identity thereto.

[0331] In one embodiment, the dead Cas9 may be based on the canonical SpCas9 sequence of Q99ZW2 and may have the following sequence, which comprises a D10A and an H810A substitutions (underlined and bolded), or be a variant of SEQ ID NO: 41 having at least 80%, at least 85%, at least 90%, at least 95%, or at least 99% sequence identity thereto.

| Description | Sequence | SEQ ID NO: |
|---|---|---|
| dead Cas9 or | MDKKYSIGLXIGTNSVGWAVITDEYKVPSKKFKVLGNTD | SEQ ID NO: 40 |
| dCas9 | RHSIKKNLIGALLFDSGETAEATRLKRTARRRYTRRKNRI | |
| Streptococcus | CYLQEIFSNEMAKVDDSFFHRLEESFLVEEDKKHERHPIF | |
| pyogenes | GNIVDEVAYHEKYPTIYHLRKKLVDSTDKADLRLIYLAL | |
| Q99ZW2 | AHMIKFRGHFLIEGDLNPDNSDVDKLFIQLVQTYNQLFEE | |
| Cas9 with | NPINTASGVDAKAILSARLSKSRRLENLIAQLPGEKKNGLF | |
| D10X and | GNLIALSLGLTPNFKSNFDLAEDAKLQLSKDTYDDDLDN | |
| H810X | LLAQIGDQYADLFLAAKNLSDAILLSDILRVNTEITKAPLS | |
| Where “X” is | ASMIKRYDEHHQDLTLLKALVRQQLPEKYKEIFFDQSKN | |
| any amino | GYAGYIDGGASQEEFYKFIKPILEKMDGTEELLVKLNRE | |
| acid | DLLRKQRTFDNGSIPHQIHLGELHAILRRQEDFYPFLKDN | |
| | REKIEKILTFRIPYYVGPLARGNSRFAWMTRKSEETITPW | |
| | NFEEVVDKGASAQSFIERMTNFDKNLPNEKVLPKHSLLY | |
| | EYFTVYNELTKVKYVTEGMRKPAFLSGEQKKAIVDLLFK | |
| | TNRKVTVKQLKEDYFKKIECFDSVEISGVEDRFNASLGT | |
| | YHDLLKIIKDKDFLDNEENEDILEDIVLTLTLFEDREMIEE | |
| | RLKTYAHLFDDKVMKQLKRRRYTGWGRLSRKLINGIRD | |
| | KQSGKTILDFLKSDGFANRNFMQLIHDDSLTFKEDIQKAQ | |
| | VSGQGDSLHEHIANLAGSPAIKKGILQTVKVVDELVKVM | |
| | GRHKPENIVIEMARENQTTQKGQKNSRERMKRIEEGIKE | |
| | LGSQILKEHPVENTQLQNEKLYLYYLQNGRDMYVDQEL | |
| | DINRLSDYDVDXIVPQSFLKDDSIDNKVLTRSDKNRGKS | |
| | DNVPSEEVVKKMKNYWRQLLNAKLITQRKFDNLTKAER | |
| | GGLSELDKAGFIKRQLVETRQITKHVAQILDSRMNTKYD | |
| | ENDKLIREVKVITLKSKLVSDFRKDFQFYKVREINTNYHH | |
| | AHDAYLNAVVGTALIKKYPKLESEFVYGDYKVYDVRK | |
| | MIAKSEQEIGKATAKYFFYSNIMNFFKTEITLANGEIRKRP | |
| | LIETNGETGEIVWDKGRDFATVRKVLSMPQVNIVKKTEV | |
| | QTGGFSKESILPKRNSDKLIARKKDWDPKKYGGFDSPTV | |
| | AYSVLVVAKVEKGKSKKLKSVKELLGITIMERSSFEKNPI | |
| | DFLEAKGYKEVKKDLIIKLPKYSLFELENGRKRMLASAG | |
| | ELQKGNELALPSKYVNFLYLASHYEKLKGSPEDNEQKQL | |
| | FVEQHKHYLDEIIEQISEFSKRVILADANLDKVLSAYNKH | |
| | RDKPIREQAENIIHLFTLTNLGAPAAFKYFDTTIDRKRYTS | |
| | TKEVLDATLIHQSITGLYETRIDLSQLGGD | |
| dead Cas9 or | MDKKYSIGLAIGTNSVGWAVITDEYKVPSKKFKVLGNTD | SEQ ID NO: 41 |
| dCas9 | RHSIKKNLIGALLFDSGETAEATRLKRTARRRYTRRKNRI | |
| Streptococcus | CYLQEIFSNEMAKVDDSFFHRLEESFLVEEDKKHERHPIF | |
| pyogenes | GNIVDEVAYHEKYPTIYHLRKKLVDSTDKADLRLIYLAL | |
| Q99ZW2 | AHMIKFRGHFLIEGDLNPDNSDVDKLFIQLVQTYNQLFEE | |
| Cas9 with | NPINTASGVDAKAILSARLSKSRRLENLIAQLPGEKKNGLF | |
| D10A and | GNLIALSLGLTPNFKSNFDLAEDAKLQLSKDTYDDDLDN | |
| H810A | LLAQIGDQYADLFLAAKNLSDAILLSDILRVNTEITKAPLS | |
| | ASMIKRYDEHHQDLTLLKALVRQQLPEKYKEIFFDQSKN | |
| | GYAGYIDGGASQEEFYKFIKPILEKMDGTEELLVKLNRE | |
| | DLLRKQRTFDNGSIPHQIHLGELHAILRRQEDFYPFLKDN | |
| | REKIEKILTFRIPYYVGPLARGNSRFAWMTRKSEETITPW | |
| | NFEEVVDKGASAQSFIERMTNFDKNLPNEKVLPKHSLLY | |
| | EYFTVYNELTKVKYVTEGMRKPAFLSGEQKKAIVDLLFK | |
| | TNRKVTVKQLKEDYFKKIECFDSVETSGVEDRFNASLGT | |
| | YHDLLKIIKDKDFLDNEENEDILEDIVLTLTLFEDREMIEE | |
| | RLKTYAHLFDDKVMKQLKRRRYTGWGRLSRKLINGIRD | |
| | KQSGKTILDFLKSDGFANRNFMQLIHDDSLTFKEDIQKAQ | |
| | VSGQGDSLHEHIANLAGSPAIKKGILQTVKVVDELVKVM | |
| | GRHKPENIVIEMARENQTTQKGQKNSRERMKRIEEGIKE | |
| | LGSQILKEHPVENTQLQNEKLYLYYLQNGRDMYVDQEL | |
| | DINRLSDYDVDAIVPQSFLKDDSIDNKVLTRSDKNRGKS | |
| | DNVPSEEVVKKMKNYWRQLLNAKLITQRKFDNLTKAER | |
| | GGLSELDKAGFIKRQLVETRQITKHVAQILDSRMNTKYD | |
| | ENDKLIREVKVITLKSKLVSDFRKDFQFYKVREINTNYHH | |
| | AHDAYLNAVVGTALIKKYPKLESEFVYGDYKVYDVRK | |
| | MIAKSEQEIGKATAKYFFYSNIMNFFKTEITLANGEIRKRP | |
| | LIETNGETGEIVWDKGRDFATVRKVLSMPQVNIVKKTEV | |
| | QTGGFSKESILPKRNSDKLIARKKDWDPKKYGGFDSPTV | |
| | AYSVLVVAKVEKGKSKKLKSVKELLGITIMERSSFEKNPI | |
| | DFLEAKGYKEVKKDLIIKLPKYSLFELENGRKRMLASAG | |
| | ELQKGNELALPSKYVNFLYLASHYEKLKGSPEDNEQKQL | |
| | FVEQHKHYLDEIIEQISEFSKRVILADANLDKVLSAYNKH | |
| | RDKPIREQAENIIHLFTLTNLGAPAAFKYFDTTIDRKRYTS | |
| | TKEVLDATLIHQSITGLYETRIDLSQLGGD | |

[0332] D. Cas9 Nickase Variant

[0333] In one embodiment, the prime editors described herein comprise a Cas9 nickase. The term “Cas9 nickase” of “nCas9” refers to a variant of Cas9 which is capable of introducing a single-strand break in a double strand DNA molecule target. In some embodiments, the Cas9 nickase comprises only a single functioning nuclease domain. The wild type Cas9 (e.g., the canonical SpCas9) comprises two separate nuclease domains, namely, the RuvC domain (which cleaves the non-protospacer DNA strand) and HNH domain (which cleaves the protospacer DNA strand). In one embodiment, the Cas9 nickase comprises a mutation in the RuvC domain which inactivates the RuvC nuclease activity. For example, mutations in aspartate (D) 10, histidine (H) 983, aspartate (D) 986, or glutamate (E) 762, have been reported as loss-of-function mutations of the RuvC nuclease domain and the creation of a functional Cas9 nickase (e.g., Nishimasu et al., “Crystal structure of Cas9 in complex with guide RNA and target DNA,” Cell 156(5), 935-949, which is incorporated herein by reference). Thus, nickase mutations in the RuvC domain could include D10X, H983X, D986X, or E762X, wherein X is any amino acid other than the wild type amino acid. In certain embodiments, the nickase could be D10A, of H983A, or D986A, or E762A, or a combination thereof.

[0334] In various embodiments, the Cas9 nickase can having a mutation in the RuvC nuclease domain and have one of the following amino acid sequences, or a variant thereof having an amino acid sequence that has at least 80%, at least 85%, at least 90%, at least 95%, or at least 99% sequence identity thereto.

| Sequence | Description | SEQ ID NO: |
|---|---|---|
| Cas9 nickase | MDKKYSIGLXIGTNSVGWAVITDEYKVPSKKFKVLGNTD | SEQ ID NO: 42 |
| Streptococcus | RHSIKKNLIGALLFDSGETAEATRLKRTARRRYTRRKNRI | |
| pyogenes | CYLQEIFSNEMAKVDDSFFHRLEESFLVEEDKKHERHPIF | |
| Q99ZW2 | GNIVDEVAYHEKYPTIYHLRKKLVDSTDKADLRLIYLAL | |
| Cas9 with | AHMIKFRGHFLIEGDLNPDNSDVDKLFIQLVQTYNQLFEE | |
| D10X, | NPINASGVDAKAILSARLSKSRRLENLIAQLPGEKKNGLF | |
| wherein X is | GNLIALSLGLTPNFKSNFDLAEDAKLQLSKDTYDDDLDN | |
| any alternate | LLAQIGDQYADLFLAAKNLSDAILLSDILRVNTEITKAPLS | |
| amino acid | ASMIKRYDEHHQDLTLLKALVRQQLPEKYKEIFFDQSKN | |
| | GYAGYIDGGASQEEFYKFIKPILEKMDGTEELLVKLNRE | |
| | DLLRKQRTFDNGSIPHQIHLGELHAILRRQEDFYPFLKDN | |
| | REKIEKILTFRIPYYVGPLARGNSRFAWMTRKSEETITPW | |
| | NFEEVVDKGASAQSFIERMTNFDKNLPNEKVLPKHSLLY | |
| | EYFTVYNELTKVKYVTEGMRKPAFLSGEQKKAIVDLLFK | |
| | TNRKVTVKQLKEDYFKKIECFDSVEISGVEDRFNASLGT | |
| | YHDLLKIIKDKDFLDNEENEDILEDIVLTLTLFEDREMIEE | |
| | RLKTYAHLFDDKVMKQLKRRRYTGWGRLSRKLINGIRD | |
| | KQSGKTILDFLKSDGFANRNFMQLIHDDSLTFKEDIQKAQ | |
| | VSGQGDSLHEHIANLAGSPAIKKGILQTVKVVDELVKVM | |
| | GRHKPENIVIEMARENQTTQKGQKNSRERMKRIEEGIKE | |
| | LGSQILKEHPVENTQLQNEKLYLYYLQNGRDMYVDQEL | |
| | DINRLSDYDVDHIVPQSFLKDDSIDNKVLTRSDKNRGKS | |
| | DNVPSEEVVKKMKNYWRQLLNAKLITQRKFDNLTKAER | |
| | GGLSELDKAGFIKRQLVETRQITKHVAQILDSRMNTKYD | |
| | ENDKLIREVKVITLKSKLVSDFRKDFQFYKVREINNYHH | |
| | AHDAYLNAVVGTALIKKYPKLESEFVYGDYKVYDVRK | |
| | MIAKSEQEIGKATAKYFFYSNIMNFFKTEITLANGEIRKRP | |
| | LIETNGETGEIVWDKGRDFATVRKVLSMPQVNIVKKTEV | |
| | QTGGFSKESILPKRNSDKLIARKKDWDPKKYGGFDSPTV | |
| | AYSVLVVAKVEKGKSKKLKSVKELLGITIMERSSFEKNPI | |
| | DFLEAKGYKEVKKDLIIKLPKYSLFELENGRKRMLASAG | |
| | ELQKGNELALPSKYVNFLYLASHYEKLKGSPEDNEQKQL | |
| | FVEQHKHYLDEIIEQISEFSKRVILADANLDKVLSAYNKH | |
| | RDKPIREQAENIIHLFTLTNLGAPAAFKYFDTTIDRKRYTS | |
| | TKEVLDATLIHQSITGLYETRIDLSQLGGD | |
| Cas9 nickase | MDKKYSIGLDIGTNSVGWAVITDEYKVPSKKFKVLGNTD | SEQ ID NO: 43 |
| Streptococcus | RHSIKKNLIGALLFDSGETAEATRLKRTARRRYTRRKNRI | |
| pyogenes | CYLQEIFSNEMAKVDDSFFHRLEESFLVEEDKKHERHPIF | |
| Q99ZW2 | GNIVDEVAYHEKYPTIYHLRKKLVDSTDKADLRLIYLAL | |
| Cas9 with | AHMIKFRGHFLIEGDLNPDNSDVDKLFIQLVQTYNQLFEE | |
| E762X, | NPINTASGVDAKAILSARLSKSRRLENLIAQLPGEKKNGLF | |
| wherein X is | GNLIALSLGLTPNFKSNFDLAEDAKLQLSKDTYDDDLDN | |
| any alternate | LLAQIGDQYADLFLAAKNLSDAILLSDILRVNTEITKAPLS | |
| amino acid | ASMIKRYDEHHQDLTLLKALVRQQLPEKYKEIFFDQSKN | |
| | GYAGYIDGGASQEEFYKFIKPILEKMDGTEELLVKLNRE | |
| | DLLRKQRTFDNGSIPHQIHLGELHAILRRQEDFYPFLKDN | |
| | REKIEKILTFRIPYYVGPLARGNSRFAWMTRKSEETITPW | |
| | NFEEVVDKGASAQSFIERMTNFDKNLPNEKVLPKHSLLY | |
| | EYFTVYNELTKVKYVTEGMRKPAFLSGEQKKAIVDLLFK | |
| | TNRKVTVKQLKEDYFKKIECFDSVEISGVEDRFNASLGT | |
| | YHDLLKIIKDKDFLDNEENEDILEDIVLTLTLFEDREMIEE | |
| | RLKTYAHLFDDKVMKQLKRRRYTGWGRLSRKLINGIRD | |
| | KQSGKTILDFLKSDGFANRNFMQLIHDDSLTFKEDIQKAQ | |
| | VSGQGDSLHEHIANLAGSPAIKKGILQTVKVVDELVKVM | |
| | GRHKPENIVIXMARENQTTQKGQKNSRERMKRIEEGIKE | |
| | LGSQILKEHPVENTQLQNEKLYLYYLQNGRDMYVDQEL | |
| | DINRLSDYDVDHIVPQSFLKDDSIDNKVLTRSDKNRGKS | |
| | DNVPSEEVVKKMKNYWRQLLNAKLITQRKFDNLTKAER | |
| | GGLSELDKAGFIKRQLVETRQITKHVAQILDSRMNTKYD | |
| | ENDKLIREVKVITLKSKLVSDFRKDFQFYKVREINTNYHH | |
| | AHDAYLNAVVGTALIKKYPKLESEFVYGDYKVYDVRK | |
| | MIAKSEQEIGKATAKYFFYSNIMNFFKTEITLANGEIRKRP | |
| | LIETNGETGEIVWDKGRDFATVRKVLSMPQVNIVKKTEV | |
| | QTGGFSKESILPKRNSDKLIARKKDWDPKKYGGFDSPTV | |
| | AYSVLVVAKVEKGKSKKLKSVKELLGITIMERSSFEKNPI | |
| | DFLEAKGYKEVKKDLIIKLPKYSLFELENGRKRMLASAG | |
| | ELQKGNELALPSKYVNFLYLASHYEKLKGSPEDNEQKQL | |
| | FVEQHKHYLDEIIEQISEFSKRVILADANLDKVLSAYNKH | |
| | RDKPIREQAENIIHLFTLTNLGAPAAFKYFDTTIDRKRYTS | |
| | TKEVLDATLIHQSITGLYETRIDLSQLGGD | |
| Cas9 nickase | MDKKYSIGLDIGTNSVGWAVITDEYKVPSKKFKVLGNTD | SEQ ID NO: 44 |
| Streptococcus | RHSIKKNLIGALLFDSGETAEATRLKRTARRRYTRRKNRI | |
| pyogenes | CYLQEIFSNEMAKVDDSFFHRLEESFLVEEDKKHERHPIF | |
| Q99ZW2 | GNIVDEVAYHEKYPTIYHLRKKLVDSTDKADLRLIYLAL | |
| Cas9 with | AHMIKFRGHFLIEGDLNPDNSDVDKLFIQLVQTYNQLFEE | |
| H983X, | NPINTASGVDAKAILSARLSKSRRLENLIAQLPGEKKNGLF | |
| wherein X is | GNLIALSLGLTPNFKSNFDLAEDAKLQLSKDTYDDDLDN | |
| any alternate | LLAQIGDQYADLFLAAKNLSDAILLSDILRVNTEITKAPLS | |
| amino acid | ASMIKRYDEHHQDLTLLKALVRQQLPEKYKEIFFDQSKN | |
| | GYAGYIDGGASQEEFYKFIKPILEKMDGTEELLVKLNRE | |
| | DLLRKQRTFDNGSIPHQIHLGELHAILRRQEDFYPFLKDN | |
| | REKIEKILTFRIPYYVGPLARGNSRFAWMTRKSEETITPW | |
| | NFEEVVDKGASAQSFIERMTNFDKNLPNEKVLPKHSLLY | |
| | EYFTVYNELTKVKYVTEGMRKPAFLSGEQKKAIVDLLFK | |
| | TNRKVTVKQLKEDYFKKIECFDSVEISGVEDRFNASLGT | |
| | YHDLLKIIKDKDFLDNEENEDILEDIVLTLTLFEDREMIEE | |
| | RLKTYAHLFDDKVMKQLKRRRYTGWGRLSRKLINGIRD | |
| | KQSGKTILDFLKSDGFANRNFMQLIHDDSLTFKEDIQKAQ | |
| | VSGQGDSLHEHIANLAGSPAIKKGILQTVKVVDELVKVM | |
| | GRHKPENIVIEMARENQTTQKGQKNSRERMKRIEEGIKE | |
| | LGSQILKEHPVENTQLQNEKLYLYYLQNGRDMYVDQEL | |
| | DINRLSDYDVDHIVPQSFLKDDSIDNKVLTRSDKNRGKS | |
| | DNVPSEEVVKKMKNYWRQLLNAKLITQRKFDNLTKAER | |
| | GGLSELDKAGFIKRQLVETRQITKHVAQILDSRMNTKYD | |
| | ENDKLIREVKVITLKSKLVSDFRKDFQFYKVREINTNYHX | |
| | AHDAYLNAVVGTALIKKYPKLESEFVYGDYKVYDVRK | |
| | MIAKSEQEIGKATAKYFFYSNIMNFFKTEITLANGEIRKRP | |
| | LIETNGETGEIVWDKGRDFATVRKVLSMPQVNIVKKTEV | |
| | QTGGFSKESILPKRNSDKLIARKKDWDPKKYGGFDSPTV | |
| | AYSVLVVAKVEKGKSKKLKSVKELLGITIMERSSFEKNPI | |
| | DFLEAKGYKEVKKDLIIKLPKYSLFELENGRKRMLASAG | |
| | ELQKGNELALPSKYVNFLYLASHYEKLKGSPEDNEQKQL | |
| | FVEQHKHYLDEIIEQISEFSKRVILADANLDKVLSAYNKH | |
| | RDKPIREQAENIIHLFTLTNLGAPAAFKYFDTTIDRKRYTS | |
| | TKEVLDATLIHQSITGLYETRIDLSQLGGD | |
| Cas9 nickase | MDKKYSIGLDIGTNSVGWAVITDEYKVPSKKFKVLGNTD | SEQ ID NO: 45 |
| Streptococcus | RHSIKKNLIGALLFDSGETAEATRLKRTARRRYTRRKNRI | |
| pyogenes | CYLQEIFSNEMAKVDDSFFHRLEESFLVEEDKKHERHPIF | |
| Q99ZW2 | GNIVDEVAYHEKYPTIYHLRKKLVDSTDKADLRLIYLAL | |
| Cas9 with | AHMIKFRGHFLIEGDLNPDNSDVDKLFIQLVQTYNQLFEE | |
| D986X, | NPINTASGVDAKAILSARLSKSRRLENLIAQLPGEKKNGLF | |
| wherein X is | GNLIALSLGLTPNFKSNFDLAEDAKLQLSKDTYDDDLDN | |
| any alternate | LLAQIGDQYADLFLAAKNLSDAILLSDILRVNTEITKAPLS | |
| amino acid | ASMIKRYDEHHQDLTLLKALVRQQLPEKYKEIFFDQSKN | |
| | GYAGYIDGGASQEEFYKFIKPILEKMDGTEELLVKLNRE | |
| | DLLRKQRTFDNGSIPHQIHLGELHAILRRQEDFYPFLKDN | |
| | REKIEKILTFRIPYYVGPLARGNSRFAWMTRKSEETITPW | |
| | NFEEVVDKGASAQSFIERMTNFDKNLPNEKVLPKHSLLY | |
| | EYFTVYNELTKVKYVTEGMRKPAFLSGEQKKAIVDLLFK | |
| | TNRKVTVKQLKEDYFKKIECFDSVEISGVEDRFNASLGT | |
| | YHDLLKIIKDKDFLDNEENEDILEDIVLTLTLFEDREMIEE | |
| | RLKTYAHLFDDKVMKQLKRRRYTGWGRLSRKLINGIRD | |
| | KQSGKTILDFLKSDGFANRNFMQLIHDDSLTFKEDIQKAQ | |
| | VSGQGDSLHEHIANLAGSPAIKKGILQTVKVVDELVKVM | |
| | GRHKPENIVIEMARENQTTQKGQKNSRERMKRIEEGIKE | |
| | LGSQILKEHPVENTQLQNEKLYLYYLQNGRDMYVDQEL | |
| | DINRLSDYDVDHIVPQSFLKDDSIDNKVLTRSDKNRGKS | |
| | DNVPSEEVVKKMKNYWRQLLNAKLITQRKFDNLTKAER | |
| | GGLSELDKAGFIKRQLVETRQITKHVAQILDSRMNTKYD | |
| | ENDKLIREVKVITLKSKLVSDFRKDFQFYKVREINTNYHH | |
| | AHXAYLNAVVGTALIKKYPKLESEFVYGDYKVYDVRK | |
| | MIAKSEQEIGKATAKYFFYSNIMNFFKTEITLANGEIRKRP | |
| | LIETNGETGEIVWDKGRDFATVRKVLSMPQVNIVKKTEV | |
| | QTGGFSKESILPKRNSDKLIARKKDWDPKKYGGFDSPTV | |
| | AYSVLVVAKVEKGKSKKLKSVKELLGITIMERSSFEKNPI | |
| | DFLEAKGYKEVKKDLIIKLPKYSLFELENGRKRMLASAG | |
| | ELQKGNELALPSKYVNFLYLASHYEKLKGSPEDNEQKQL | |
| | FVEQHKHYLDEIIEQISEFSKRVILADANLDKVLSAYNKH | |
| | RDKPIREQAENIIHLFTLTNLGAPAAFKYFDTTIDRKRYTS | |
| | TKEVLDATLIHQSITGLYETRIDLSQLGGD | |
| Cas9 nickase | MDKKYSIGLAIGTNSVGWAVITDEYKVPSKKFKVLGNTD | SEQ ID NO: 46 |
| Streptococcus | RHSIKKNLIGALLFDSGETAEATRLKRTARRRYTRRKNRI | |
| pyogenes | CYLQEIFSNEMAKVDDSFFHRLEESFLVEEDKKHERHPIF | |
| Q99ZW2 | GNIVDEVAYHEKYPTIYHLRKKLVDSTDKADLRLIYLAL | |
| Cas9 with | AHMIKFRGHFLIEGDLNPDNSDVDKLFIQLVQTYNQLFEE | |
| D10A | NPINTASGVDAKAILSARLSKSRRLENLIAQLPGEKKNGLF | |
| | GNLIALSLGLTPNFKSNFDLAEDAKLQLSKDTYDDDLDN | |
| | LLAQIGDQYADLFLAAKNLSDAILLSDILRVNTEITKAPLS | |
| | ASMIKRYDEHHQDLTLLKALVRQQLPEKYKEIFFDQSKN | |
| | GYAGYIDGGASQEEFYKFIKPILEKMDGTEELLVKLNRE | |
| | DLLRKQRTFDNGSIPHQIHLGELHAILRRQEDFYPFLKDN | |
| | REKIEKILTFRIPYYVGPLARGNSRFAWMTRKSEETITPW | |
| | NFEEVVDKGASAQSFIERMTNFDKNLPNEKVLPKHSLLY | |
| | EYFTVYNELTKVKYVTEGMRKPAFLSGEQKKAIVDLLFK | |
| | TNRKVTVKQLKEDYFKKIECFDSVEISGVEDRFNASLGT | |
| | YHDLLKIIKDKDFLDNEENEDILEDIVLTLTLFEDREMIEE | |
| | RLKTYAHLFDDKVMKQLKRRRYTGWGRLSRKLINGIRD | |
| | KQSGKTILDFLKSDGFANRNFMQLIHDDSLTFKEDIQKAQ | |
| | VSGQGDSLHEHIANLAGSPAIKKGILQTVKVVDELVKVM | |
| | GRHKPENIVIEMARENQTTQKGQKNSRERMKRIEEGIKE | |
| | LGSQILKEHPVENTQLQNEKLYLYYLQNGRDMYVDQEL | |
| | DINRLSDYDVDHIVPQSFLKDDSIDNKVLTRSDKNRGKS | |
| | DNVPSEEVVKKMKNYWRQLLNAKLITQRKFDNLTKAER | |
| | GGLSELDKAGFIKRQLVETRQITKHVAQILDSRMNTKYD | |
| | ENDKLIREVKVITLKSKLVSDFRKDFQFYKVREINTNYHH | |
| | AHDAYLNAVVGTALIKKYPKLESEFVYGDYKVYDVRK | |
| | MIAKSEQEIGKATAKYFFYSNIMNFFKTEITLANGEIRKRP | |
| | LIETNGETGEIVWDKGRDFATVRKVLSMPQVNIVKKTEV | |
| | QTGGFSKESILPKRNSDKLIARKKDWDPKKYGGFDSPTV | |
| | AYSVLVVAKVEKGKSKKLKSVKELLGITIMERSSFEKNPI | |
| | DFLEAKGYKEVKKDLIIKLPKYSLFELENGRKRMLASAG | |
| | ELQKGNELALPSKYVNFLYLASHYEKLKGSPEDNEQKQL | |
| | FVEQHKHYLDEIIEQISEFSKRVILADANLDKVLSAYNKH | |
| | RDKPIREQAENIIHLFTLTNLGAPAAFKYFDTTIDRKRYTS | |
| | TKEVLDATLIHQSITGLYETRIDLSQLGGD | |
| Cas9 nickase | MDKKYSIGLDIGTNSVGWAVITDEYKVPSKKFKVLGNTD | SEQ ID NO: 47 |
| Streptococcus | RHSIKKNLIGALLFDSGETAEATRLKRTARRRYTRRKNRI | |
| pyogenes | CYLQEIFSNEMAKVDDSFFHRLEESFLVEEDKKHERHPIF | |
| Q99ZW2 | GNIVDEVAYHEKYPTIYHLRKKLVDSTDKADLRLIYLAL | |
| Cas9 with | AHMIKFRGHFLIEGDLNPDNSDVDKLFIQLVQTYNQLFEE | |
| E762A | NPINTASGVDAKAILSARLSKSRRLENLIAQLPGEKKNGLF | |
| | GNLIALSLGLTPNFKSNFDLAEDAKLQLSKDTYDDDLDN | |
| | LLAQIGDQYADLFLAAKNLSDAILLSDILRVNTEITKAPLS | |
| | ASMIKRYDEHHQDLTLLKALVRQQLPEKYKEIFFDQSKN | |
| | GYAGYIDGGASQEEFYKFIKPILEKMDGTEELLVKLNRE | |
| | DLLRKQRTFDNGSIPHQIHLGELHAILRRQEDFYPFLKDN | |
| | REKIEKILTFRIPYYVGPLARGNSRFAWMTRKSEETITPW | |
| | NFEEVVDKGASAQSFIERMTNFDKNLPNEKVLPKHSLLY | |
| | EYFTVYNELTKVKYVTEGMRKPAFLSGEQKKAIVDLLFK | |
| | TNRKVTVKQLKEDYFKKIECFDSVEISGVEDRFNASLGT | |
| | YHDLLKIIKDKDFLDNEENEDILEDIVLTLTLFEDREMIEE | |
| | RLKTYAHLFDDKVMKQLKRRRYTGWGRLSRKLINGIRD | |
| | KQSGKTILDFLKSDGFANRNFMQLIHDDSLTFKEDIQKAQ | |
| | VSGQGDSLHEHIANLAGSPAIKKGILQTVKVVDELVKVM | |
| | GRHKPENIVIAMARENQTTQKGQKNSRERMKRIEEGIKE | |
| | LGSQILKEHPVENTQLQNEKLYLYYLQNGRDMYVDQEL | |
| | DINRLSDYDVDHIVPQSFLKDDSIDNKVLTRSDKNRGKS | |
| | DNVPSEEVVKKMKNYWRQLLNAKLITQRKFDNLTKAER | |
| | GGLSELDKAGFIKRQLVETRQITKHVAQILDSRMNTKYD | |
| | ENDKLIREVKVITLKSKLVSDFRKDFQFYKVREINTNYHH | |
| | AHDAYLNAVVGTALIKKYPKLESEFVYGDYKVYDVRK | |
| | MIAKSEQEIGKATAKYFFYSNIMNFFKTEITLANGEIRKRP | |
| | LIETNGETGEIVWDKGRDFATVRKVLSMPQVNIVKKTEV | |
| | QTGGFSKESILPKRNSDKLIARKKDWDPKKYGGFDSPTV | |
| | AYSVLVVAKVEKGKSKKLKSVKELLGITIMERSSFEKNPI | |
| | DFLEAKGYKEVKKDLIIKLPKYSLFELENGRKRMLASAG | |
| | ELQKGNELALPSKYVNFLYLASHYEKLKGSPEDNEQKQL | |
| | FVEQHKHYLDEIIEQISEFSKRVILADANLDKVLSAYNKH | |
| | RDKPIREQAENIIHLFTLTNLGAPAAFKYFDTTIDRKRYTS | |
| | TKEVLDATLIHQSITGLYETRIDLSQLGGD | |
| Cas9 nickase | MDKKYSIGLDIGTNSVGWAVITDEYKVPSKKFKVLGNTD | SEQ ID NO: 48 |
| Streptococcus | RHSIKKNLIGALLFDSGETAEATRLKRTARRRYTRRKNRI | |
| pyogenes | CYLQEIFSNEMAKVDDSFFHRLEESFLVEEDKKHERHPIF | |
| Q99ZW2 | GNIVDEVAYHEKYPTIYHLRKKLVDSTDKADLRLIYLAL | |
| Cas9 with | AHMIKFRGHFLIEGDLNPDNSDVDKLFIQLVQTYNQLFEE | |
| H983A | NPINTASGVDAKAILSARLSKSRRLENLIAQLPGEKKNGLF | |
| | GNLIALSLGLTPNFKSNFDLAEDAKLQLSKDTYDDDLDN | |
| | LLAQIGDQYADLFLAAKNLSDAILLSDILRVNTEITKAPLS | |
| | ASMIKRYDEHHQDLTLLKALVRQQLPEKYKEIFFDQSKN | |
| | GYAGYIDGGASQEEFYKFIKPILEKMDGTEELLVKLNRE | |
| | DLLRKQRTFDNGSIPHQIHLGELHAILRRQEDFYPFLKDN | |
| | REKIEKILTFRIPYYVGPLARGNSRFAWMTRKSEETITPW | |
| | NFEEVVDKGASAQSFIERMTNFDKNLPNEKVLPKHSLLY | |
| | EYFTVYNELTKVKYVTEGMRKPAFLSGEQKKAIVDLLFK | |
| | TNRKVTVKQLKEDYFKKIECFDSVETSGVEDRFNASLGT | |
| | YHDLLKIIKDKDFLDNEENEDILEDIVLTLTLFEDREMIEE | |
| | RLKTYAHLFDDKVMKQLKRRRYTGWGRLSRKLINGIRD | |
| | KQSGKTILDFLKSDGFANRNFMQLIHDDSLTFKEDIQKAQ | |
| | VSGQGDSLHEHIANLAGSPAIKKGILQTVKVVDELVKVM | |
| | GRHKPENIVIEMARENQTTQKGQKNSRERMKRIEEGIKE | |
| | LGSQILKEHPVENTQLQNEKLYLYYLQNGRDMYVDQEL | |
| | DINRLSDYDVDHIVPQSFLKDDSIDNKVLTRSDKNRGKS | |
| | DNVPSEEVVKKMKNYWRQLLNAKLITQRKFDNLTKAER | |
| | GGLSELDKAGFIKRQLVETRQITKHVAQILDSRMNTKYD | |
| | ENDKLIREVKVITLKSKLVSDFRKDFQFYKVREINTNYHA | |
| | AHDAYLNAVVGTALIKKYPKLESEFVYGDYKVYDVRK | |
| | MIAKSEQEIGKATAKYFFYSNIMNFFKTEITLANGEIRKRP | |
| | LIETNGETGEIVWDKGRDFATVRKVLSMPQVNIVKKTEV | |
| | QTGGFSKESILPKRNSDKLIARKKDWDPKKYGGFDSPTV | |
| | AYSVLVVAKVEKGKSKKLKSVKELLGITIMERSSFEKNPI | |
| | DFLEAKGYKEVKKDLIIKLPKYSLFELENGRKRMLASAG | |
| | ELQKGNELALPSKYVNFLYLASHYEKLKGSPEDNEQKQL | |
| | FVEQHKHYLDEIIEQISEFSKRVILADANLDKVLSAYNKH | |
| | RDKPIREQAENIIHLFTLTNLGAPAAFKYFDTTIDRKRYTS | |
| | TKEVLDATLIHQSITGLYETRIDLSQLGGD | |
| Cas9 nickase | MDKKYSIGLDIGTNSVGWAVITDEYKVPSKKFKVLGNTD | SEQ ID NO: 49 |
| Streptococcus | RHSIKKNLIGALLFDSGETAEATRLKRTARRRYTRRKNRI | |
| pyogenes | CYLQEIFSNEMAKVDDSFFHRLEESFLVEEDKKHERHPIF | |
| Q99ZW2 | GNIVDEVAYHEKYPTIYHLRKKLVDSTDKADLRLIYLAL | |
| Cas9 with | AHMIKFRGHFLIEGDLNPDNSDVDKLFIQLVQTYNQLFEE | |
| D986A | NPINTASGVDAKAILSARLSKSRRLENLIAQLPGEKKNGLF | |
| | GNLIALSLGLTPNFKSNFDLAEDAKLQLSKDTYDDDLDN | |
| | LLAQIGDQYADLFLAAKNLSDAILLSDILRVNTEITKAPLS | |
| | AS MIKRYDEHHQDLTLLKALVRQQLPEKYKEIFFDQSKN | |
| | GYAGYIDGGASQEEFYKFIKPILEKMDGTEELLVKLNRE | |
| | DLLRKQRTFDNGSIPHQIHLGELHAILRRQEDFYPFLKDN | |
| | REKIEKILTFRIPYYVGPLARGNSRFAWMTRKSEETITPW | |
| | NFEEVVDKGASAQSFIERMTNFDKNLPNEKVLPKHSLLY | |
| | EYFTVYNELTKVKYVTEGMRKPAFLSGEQKKAIVDLLFK | |
| | TNRKVTVKQLKEDYFKKIECFDSVETSGVEDRFNASLGT | |
| | YHDLLKIIKDKDFLDNEENEDILEDIVLTLTLFEDREMIEE | |
| | RLKTYAHLFDDKVMKQLKRRRYTGWGRLSRKLINGIRD | |
| | KQSGKTILDFLKSDGFANRNFMQLIHDDSLTFKEDIQKAQ | |
| | VSGQGDSLHEHIANLAGSPAIKKGILQTVKVVDELVKVM | |
| | GRHKPENIVIEMARENQTTQKGQKNSRERMKRIEEGIKE | |
| | LGSQILKEHPVENTQLQNEKLYLYYLQNGRDMYVDQEL | |
| | DINRLSDYDVDHIVPQSFLKDDSIDNKVLTRSDKNRGKS | |
| | DNVPSEEVVKKMKNYWRQLLNAKLITQRKFDNLTKAER | |
| | GGLSELDKAGFIKRQLVETRQITKHVAQILDSRMNTKYD | |
| | ENDKLIREVKVITLKSKLVSDFRKDFQFYKVREINTNYHH | |
| | AHAAYLNAVVGTALIKKYPKLESEFVYGDYKVYDVRK | |
| | MIAKSEQEIGKATAKYFFYSNIMNFFKTEITLANGEIRKRP | |
| | LIETNGETGEIVWDKGRDFATVRKVLSMPQVNIVKKTEV | |
| | QTGGFSKESILPKRNSDKLIARKKDWDPKKYGGFDSPTV | |
| | AYSVLVVAKVEKGKSKKLKSVKELLGITIMERSSFEKNPI | |
| | DFLEAKGYKEVKKDLIIKLPKYSLFELENGRKRMLASAG | |
| | ELQKGNELALPSKYVNFLYLASHYEKLKGSPEDNEQKQL | |
| | FVEQHKHYLDEIIEQISEFSKRVILADANLDKVLSAYNKH | |
| | RDKPIREQAENIIHLFTLTNLGAPAAFKYFDTTIDRKRYTS | |
| | TKEVLDATLIHQSITGLYETRIDLSQLGGD | |

[0335] In another embodiment, the Cas9 nickase comprises a mutation in the HNH domain which inactivates the HNH nuclease activity. For example, mutations in histidine (H) 840 or asparagine (R) 863 have been reported as loss-of-function mutations of the HNH nuclease domain and the creation of a functional Cas9 nickase (e.g., Nishimasu et al., “Crystal structure of Cas9 in complex with guide RNA and target DNA,” Cell 156(5), 935-949, which is incorporated herein by reference). Thus, nickase mutations in the HNH domain could include H840X and R863X, wherein X is any amino acid other than the wild type amino acid. In certain embodiments, the nickase could be H840A or R863A or a combination thereof.

[0336] In various embodiments, the Cas9 nickase can have a mutation in the HNH nuclease domain and have one of the following amino acid sequences, or a variant thereof having an amino acid sequence that has at least 80%, at least 85%, at least 90%, at least 95%, or at least 99% sequence identity thereto.

| Sequence | Description | SEQ ID NO: |
|---|---|---|
| Cas9 nickase | MDKKYSIGLDIGTNSVGWAVITDEYKVPSKKFKVLGNTD | SEQ ID NO: 50 |
| Streptococcus | RHSIKKNLIGALLFDSGETAEATRLKRTARRRYTRRKNRI | |
| pyogenes | CYLQEIFSNEMAKVDDSFFHRLEESFLVEEDKKHERHPIF | |
| Q99ZW2 | GNIVDEVAYHEKYPTIYHLRKKLVDSTDKADLRLIYLAL | |
| Cas9 with | AHMIKFRGHFLIEGDLNPDNSDVDKLFIQLVQTYNQLFEE | |
| H840X, | NPINTASGVDAKAILSARLSKSRRLENLIAQLPGEKKNGLF | |
| wherein X is | GNLIALSLGLTPNFKSNFDLAEDAKLQLSKDTYDDDLDN | |
| any alternate | LLAQIGDQYADLFLAAKNLSDAILLSDILRVNTEITKAPLS | |
| amino acid | ASMIKRYDEHHQDLTLLKALVRQQLPEKYKEIFFDQSKN | |
| | GYAGYIDGGASQEEFYKFIKPILEKMDGTEELLVKLNRE | |
| | DLLRKQRTFDNGSIPHQIHLGELHAILRRQEDFYPFLKDN | |
| | REKIEKILTFRIPYYVGPLARGNSRFAWMTRKSEETITPW | |
| | NFEEVVDKGASAQSFIERMTNFDKNLPNEKVLPKHSLLY | |
| | EYFTVYNELTKVKYVTEGMRKPAFLSGEQKKAIVDLLFK | |
| | TNRKVTVKQLKEDYFKKIECFDSVEISGVEDRFNASLGT | |
| | YHDLLKIIKDKDFLDNEENEDILEDIVLTLTLFEDREMIEE | |
| | RLKTYAHLFDDKVMKQLKRRRYTGWGRLSRKLINGIRD | |
| | KQSGKTILDFLKSDGFANRNFMQLIHDDSLTFKEDIQKAQ | |
| | VSGQGDSLHEHIANLAGSPAIKKGILQTVKVVDELVKVM | |
| | GRHKPENIVIEMARENQTTQKGQKNSRERMKRIEEGIKE | |
| | LGSQILKEHPVENTQLQNEKLYLYYLQNGRDMYVDQEL | |
| | DINRLSDYDVDXIVPQSFLKDDSIDNKVLTRSDKNRGKS | |
| | DNVPSEEVVKKMKNYWRQLLNAKLITQRKFDNLTKAER | |
| | GGLSELDKAGFIKRQLVETRQITKHVAQILDSRMNTKYD | |
| | ENDKLIREVKVITLKSKLVSDFRKDFQFYKVREININYHH | |
| | AHDAYLNAVVGTALIKKYPKLESEFVYGDYKVYDVRK | |
| | MIAKSEQEIGKATAKYFFYSNIMNFFKTEITLANGEIRKRP | |
| | LIETNGETGEIVWDKGRDFATVRKVLSMPQVNIVKKTEV | |
| | QTGGFSKESILPKRNSDKLIARKKDWDPKKYGGFDSPTV | |
| | AYSVLVVAKVEKGKSKKLKSVKELLGITIMERSSFEKNPI | |
| | DFLEAKGYKEVKKDLIIKLPKYSLFELENGRKRMLASAG | |
| | ELQKGNELALPSKYVNFLYLASHYEKLKGSPEDNEQKQL | |
| | FVEQHKHYLDEIIEQISEFSKRVILADANLDKVLSAYNKH | |
| | RDKPIREQAENIIHLFTLTNLGAPAAFKYFDTTIDRKRYTS | |
| | TKEVLDATLIHQSITGLYETRIDLSQLGGD | |
| Cas9 nickase | MDKKYSIGLDIGTNSVGWAVITDEYKVPSKKFKVLGNTD | SEQ ID NO: 51 |
| Streptococcus | RHSIKKNLIGALLFDSGETAEATRLKRTARRRYTRRKNRI | |
| pyogenes | CYLQEIFSNEMAKVDDSFFHRLEESFLVEEDKKHERHPIF | |
| Q99ZW2 | GNIVDEVAYHEKYPTIYHLRKKLVDSTDKADLRLIYLAL | |
| Cas9 with | AHMIKFRGHFLIEGDLNPDNSDVDKLFIQLVQTYNQLFEE | |
| H840A | NPINASGVDAKAILSARLSKSRRLENLIAQLPGEKKNGLF | |
| | GNLIALSLGLTPNFKSNFDLAEDAKLQLSKDTYDDDLDN | |
| | LLAQIGDQYADLFLAAKNLSDAILLSDILRVNTEITKAPLS | |
| | ASMIKRYDEHHQDLTLLKALVRQQLPEKYKEIFFDQSKN | |
| | GYAGYIDGGASQEEFYKFIKPILEKMDGTEELLVKLNRE | |
| | DLLRKQRTFDNGSIPHQIHLGELHAILRRQEDFYPFLKDN | |
| | REKIEKILTFRIPYYVGPLARGNSRFAWMTRKSEETITPW | |
| | NFEEVVDKGASAQSFIERMTNFDKNLPNEKVLPKHSLLY | |
| | EYFTVYNELTKVKYVTEGMRKPAFLSGEQKKAIVDLLFK | |
| | TNRKVTVKQLKEDYFKKIECFDSVETSGVEDRFNASLGT | |
| | YHDLLKIIKDKDFLDNEENEDILEDIVLTLTLFEDREMIEE | |
| | RLKTYAHLFDDKVMKQLKRRRYTGWGRLSRKLINGIRD | |
| | KQSGKTILDFLKSDGFANRNFMQLIHDDSLTFKEDIQKAQ | |
| | VSGQGDSLHEHIANLAGSPAIKKGILQTVKVVDELVKVM | |
| | GRHKPENIVIEMARENQTTQKGQKNSRERMKRIEEGIKE | |
| | LGSQILKEHPVENTQLQNEKLYLYYLQNGRDMYVDQEL | |
| | DINRLSDYDVDAIVPQSFLKDDSIDNKVLTRSDKNRGKS | |
| | DNVPSEEVVKKMKNYWRQLLNAKLITQRKFDNLTKAER | |
| | GGLSELDKAGFIKRQLVETRQITKHVAQILDSRMNTKYD | |
| | ENDKLIREVKVITLKSKLVSDFRKDFQFYKVREININYHH | |
| | AHDAYLNAVVGTALIKKYPKLESEFVYGDYKVYDVRK | |
| | MIAKSEQEIGKATAKYFFYSNIMNFFKTEITLANGEIRKRP | |
| | LIETNGETGEIVWDKGRDFATVRKVLSMPQVNIVKKTEV | |
| | QTGGFSKESILPKRNSDKLIARKKDWDPKKYGGFDSPTV | |
| | AYSVLVVAKVEKGKSKKLKSVKELLGITIMERSSFEKNPI | |
| | DFLEAKGYKEVKKDLIIKLPKYSLFELENGRKRMLASAG | |
| | ELQKGNELALPSKYVNFLYLASHYEKLKGSPEDNEQKQL | |
| | FVEQHKHYLDEIIEQISEFSKRVILADANLDKVLSAYNKH | |
| | RDKPIREQAENIIHLFTLTNLGAPAAFKYFDTTIDRKRYTS | |
| | TKEVLDATLIHQSITGLYETRIDLSQLGGD | |
| Cas9 nickase | MDKKYSIGLDIGTNSVGWAVITDEYKVPSKKFKVLGNTD | SEQ ID NO: 52 |
| Streptococcus | RHSIKKNLIGALLFDSGETAEATRLKRTARRRYTRRKNRI | |
| pyogenes | CYLQEIFSNEMAKVDDSFFHRLEESFLVEEDKKHERHPIF | |
| Q99ZW2 | GNIVDEVAYHEKYPTIYHLRKKLVDSTDKADLRLIYLAL | |
| Cas9 with | AHMIKFRGHFLIEGDLNPDNSDVDKLFIQLVQTYNQLFEE | |
| R863X, | NPINTASGVDAKAILSARLSKSRRLENLIAQLPGEKKNGLF | |
| wherein X is | GNLIALSLGLTPNFKSNFDLAEDAKLQLSKDTYDDDLDN | |
| any alternate | LLAQIGDQYADLFLAAKNLSDAILLSDILRVNTEITKAPLS | |
| amino acid | ASMIKRYDEHHQDLTLLKALVRQQLPEKYKEIFFDQSKN | |
| | GYAGYIDGGASQEEFYKFIKPILEKMDGTEELLVKLNRE | |
| | DLLRKQRTFDNGSIPHQIHLGELHAILRRQEDFYPFLKDN | |
| | REKIEKILTFRIPYYVGPLARGNSRFAWMTRKSEETITPW | |
| | NFEEVVDKGASAQSFIERMTNFDKNLPNEKVLPKHSLLY | |
| | EYFTVYNELTKVKYVTEGMRKPAFLSGEQKKAIVDLLFK | |
| | TNRKVTVKQLKEDYFKKIECFDSVEISGVEDRFNASLGT | |
| | YHDLLKIIKDKDFLDNEENEDILEDIVLTLTLFEDREMIEE | |
| | RLKTYAHLFDDKVMKQLKRRRYTGWGRLSRKLINGIRD | |
| | KQSGKTILDFLKSDGFANRNFMQLIHDDSLTFKEDIQKAQ | |
| | VSGQGDSLHEHIANLAGSPAIKKGILQTVKVVDELVKVM | |
| | GRHKPENIVIEMARENQTTQKGQKNSRERMKRIEEGIKE | |
| | LGSQILKEHPVENTQLQNEKLYLYYLQNGRDMYVDQEL | |
| | DINRLSDYDVDHIVPQSFLKDDSIDNKVLTRSDKNXGKS | |
| | DNVPSEEVVKKMKNYWRQLLNAKLITQRKFDNLTKAER | |
| | GGLSELDKAGFIKRQLVETRQITKHVAQILDSRMNTKYD | |
| | ENDKLIREVKVITLKSKLVSDFRKDFQFYKVREINTNYHH | |
| | AHDAYLNAVVGTALIKKYPKLESEFVYGDYKVYDVRK | |
| | MIAKSEQEIGKATAKYFFYSNIMNFFKTEITLANGEIRKRP | |
| | LIETNGETGEIVWDKGRDFATVRKVLSMPQVNIVKKTEV | |
| | QTGGFSKESILPKRNSDKLIARKKDWDPKKYGGFDSPTV | |
| | AYSVLVVAKVEKGKSKKLKSVKELLGITIMERSSFEKNPI | |
| | DFLEAKGYKEVKKDLIIKLPKYSLFELENGRKRMLASAG | |
| | ELQKGNELALPSKYVNFLYLASHYEKLKGSPEDNEQKQL | |
| | FVEQHKHYLDEIIEQISEFSKRVILADANLDKVLSAYNKH | |
| | RDKPIREQAENIIHLFTLTNLGAPAAFKYFDTTIDRKRYTS | |
| | TKEVLDATLIHQSITGLYETRIDLSQLGGD | |
| Cas9 nickase | MDKKYSIGLDIGTNSVGWAVITDEYKVPSKKFKVLGNTD | SEQ ID NO: 53 |
| Streptococcus | RHSIKKNLIGALLFDSGETAEATRLKRTARRRYTRRKNRI | |
| pyogenes | CYLQEIFSNEMAKVDDSFFHRLEESFLVEEDKKHERHPIF | |
| Q99ZW2 | GNIVDEVAYHEKYPTIYHLRKKLVDSTDKADLRLIYLAL | |
| Cas9 with | AHMIKFRGHFLIEGDLNPDNSDVDKLFIQLVQTYNQLFEE | |
| R863A | NPINTASGVDAKAILSARLSKSRRLENLIAQLPGEKKNGLF | |
| | GNLIALSLGLTPNFKSNFDLAEDAKLQLSKDTYDDDLDN | |
| | LLAQIGDQYADLFLAAKNLSDAILLSDILRVNTEITKAPLS | |
| | ASMIKRYDEHHQDLTLLKALVRQQLPEKYKEIFFDQSKN | |
| | GYAGYIDGGASQEEFYKFIKPILEKMDGTEELLVKLNRE | |
| | DLLRKQRTFDNGSIPHQIHLGELHAILRRQEDFYPFLKDN | |
| | REKIEKILTFRIPYYVGPLARGNSRFAWMTRKSEETITPW | |
| | NFEEVVDKGASAQSFIERMTNFDKNLPNEKVLPKHSLLY | |
| | EYFTVYNELTKVKYVTEGMRKPAFLSGEQKKAIVDLLFK | |
| | TNRKVTVKQLKEDYFKKIECFDSVETSGVEDRFNASLGT | |
| | YHDLLKIIKDKDFLDNEENEDILEDIVLTLTLFEDREMIEE | |
| | RLKTYAHLFDDKVMKQLKRRRYTGWGRLSRKLINGIRD | |
| | KQSGKTILDFLKSDGFANRNFMQLIHDDSLTFKEDIQKAQ | |
| | VSGQGDSLHEHIANLAGSPAIKKGILQTVKVVDELVKVM | |
| | GRHKPENIVIEMARENQTTQKGQKNSRERMKRIEEGIKE | |
| | LGSQILKEHPVENTQLQNEKLYLYYLQNGRDMYVDQEL | |
| | DINRLSDYDVDHIVPQSFLKDDSIDNKVLTRSDKNAGKS | |
| | DNVPSEEVVKKMKNYWRQLLNAKLITQRKFDNLTKAER | |
| | GGLSELDKAGFIKRQLVETRQITKHVAQILDSRMNTKYD | |
| | ENDKLIREVKVITLKSKLVSDFRKDFQFYKVREINTNYHH | |
| | AHDAYLNAVVGTALIKKYPKLESEFVYGDYKVYDVRK | |
| | MIAKSEQEIGKATAKYFFYSNIMNFFKTEITLANGEIRKRP | |
| | LIETNGETGEIVWDKGRDFATVRKVLSMPQVNIVKKTEV | |
| | QTGGFSKESILPKRNSDKLIARKKDWDPKKYGGFDSPTV | |
| | AYSVLVVAKVEKGKSKKLKSVKELLGITIMERSSFEKNPI | |
| | DFLEAKGYKEVKKDLIIKLPKYSLFELENGRKRMLASAG | |
| | ELQKGNELALPSKYVNFLYLASHYEKLKGSPEDNEQKQL | |
| | FVEQHKHYLDEIIEQISEFSKRVILADANLDKVLSAYNKH | |
| | RDKPIREQAENIIHLFTLTNLGAPAAFKYFDTTIDRKRYTS | |
| | TKEVLDATLIHQSITGLYETRIDLSQLGGD | |

[0337] In some embodiments, the N-terminal methionine is removed from a Cas9 nickase, or from any Cas9 variant, ortholog, or equivalent disclosed or contemplated herein. For example, methionine-minus Cas9 nickases include the following sequences, or a variant thereof having an amino acid sequence that has at least 80%, at least 85%, at least 90%, at least 95%, or at least 99% sequence identity thereto.

| Description | Sequence |
|---|---|
| Cas9 nickase | DKKYSIGLDIGTNSVGWAVITDEYKVPSKKFKVLGNTDRHSIKKNLIG |
| (Met minus) | ALLFDSGETAEATRLKRTARRRYTRRKNRICYLQEIFSNEMAKVDDSF |
| Streptococcus | FHRLEESFLVEEDKKHERHPIFGNIVDEVAYHEKYPTIYHLRKKLVDST |
| pyogenes | DKADLRLIYLALAHMIKFRGHFLIEGDLNPDNSDVDKLFIQLVQTYNQ |
| Q99ZW2 | LFEENPINASGVDAKAILSARLSKSRRLENLIAQLPGEKKNGLFGNLIAL |
| Cas 9 with | SLGLTPNFKSNFDLAEDAKLQLSKDTYDDDLDNLLAQIGDQYADLFLA |
| H840X, | AKNLSDAILLSDILRVNTEITKAPLSASMIKRYDEHHQDLTLLKALVRQ |
| wherein X is | QLPEKYKEIFFDQSKNGYAGYIDGGASQEEFYKFIKPILEKMDGTEELL |
| any alternate | VKLNREDLLRKQRTFDNGSIPHQIHLGELHAILRRQEDFYPFLKDNREK |
| amino acid | IEKILTFRIPYYVGPLARGNSRFAWMTRKSEETITPWNFEEVVDKGASA |
| | QSFIERMTNFDKNLPNEKVLPKHSLLYEYFTVYNELTKVKYVTEGMR |
| | KPAFLSGEQKKAIVDLLFKTNRKVTVKQLKEDYFKKIECFDSVETSGVE |
| | DRFNASLGTYHDLLKIIKDKDFLDNEENEDILEDIVLTLTLFEDREMIEE |
| | RLKTYAHLFDDKVMKQLKRRRYTGWGRLSRKLINGIRDKQSGKTILD |
| | FLKSDGFANRNFMQLIHDDSLTFKEDIQKAQVSGQGDSLHEHIANLAG |
| | SPAIKKGILQTVKVVDELVKVMGRHKPENIVIEMARENQTTQKGQKNS |
| | RERMKRIEEGIKELGSQILKEHPVENTQLQNEKLYLYYLQNGRDMYV |
| | DQELDINRLSDYDVDXIVPQSFLKDDSIDNKVLTRSDKNRGKSDNVPS |
| | EEVVKKMKNYWRQLLNAKLITQRKFDNLTKAERGGLSELDKAGFIKR |
| | QLVETRQITKHVAQILDSRMNTKYDENDKLIREVKVITLKSKLVSDFR |
| | KDFQFYKVREINNYHHAHDAYLNAVVGTALIKKYPKLESEFVYGDYK |
| | VYDVRKMIAKSEQEIGKATAKYFFYSNIMNFFKTEITLANGEIRKRPLIE |
| | TNGETGEIVWDKGRDFATVRKVLSMPQVNIVKKTEVQTGGFSKESILP |
| | KRNSDKLIARKKDWDPKKYGGFDSPTVAYSVLVVAKVEKGKSKKLK |
| | SVKELLGITIMERSSFEKNPIDFLEAKGYKEVKKDLIIKLPKYSLFELEN |
| | GRKRMLASAGELQKGNELALPSKYVNFLYLASHYEKLKGSPEDNEQK |
| | QLFVEQHKHYLDEIIEQISEFSKRVILADANLDKVLSAYNKHRDKPIRE |
| | QAENIIHLFTLTNLGAPAAFKYFDTTIDRKRYTSTKEVLDATLIHQSITG |
| | LYETRIDLSQLGGD (SEQ ID NO: 54) |
| Cas9 nickase | DKKYSIGLDIGTNSVGWAVITDEYKVPSKKFKVLGNTDRHSIKKNLIG |
| (Met minus) | ALLFDSGETAEATRLKRTARRRYTRRKNRICYLQEIFSNEMAKVDDSF |
| Streptococcus | FHRLEESFLVEEDKKHERHPIFGNIVDEVAYHEKYPTIYHLRKKLVDST |
| pyogenes | DKADLRLIYLALAHMIKFRGHFLIEGDLNPDNSDVDKLFIQLVQTYNQ |
| Q99ZW2 | LFEENPINASGVDAKAILSARLSKSRRLENLIAQLPGEKKNGLFGNLIAL |
| Cas9 with | SLGLTPNFKSNFDLAEDAKLQLSKDTYDDDLDNLLAQIGDQYADLFLA |
| H840A | AKNLSDAILLSDILRVNTEITKAPLSASMIKRYDEHHQDLTLLKALVRQ |
| | QLPEKYKEIFFDQSKNGYAGYIDGGASQEEFYKFIKPILEKMDGTEELL |
| | VKLNREDLLRKQRTFDNGSIPHQIHLGELHAILRRQEDFYPFLKDNREK |
| | IEKILTFRIPYYVGPLARGNSRFAWMTRKSEETITPWNFEEVVDKGASA |
| | QSFIERMTNFDKNLPNEKVLPKHSLLYEYFTVYNELTKVKYVTEGMR |
| | KPAFLSGEQKKAIVDLLFKTNRKVTVKQLKEDYFKKIECFDSVETSGVE |
| | DRFNASLGTYHDLLKIIKDKDFLDNEENEDILEDIVLTLTLFEDREMIEE |
| | RLKTYAHLFDDKVMKQLKRRRYTGWGRLSRKLINGIRDKQSGKTILD |
| | FLKSDGFANRNFMQLIHDDSLTFKEDIQKAQVSGQGDSLHEHIANLAG |
| | SPAIKKGILQTVKVVDELVKVMGRHKPENIVIEMARENQTTQKGQKNS |
| | RERMKRIEEGIKELGSQILKEHPVENTQLQNEKLYLYYLQNGRDMYV |
| | DQELDINRLSDYDVDAIVPQSFLKDDSIDNKVLTRSDKNRGKSDNVPS |
| | EEVVKKMKNYWRQLLNAKLITQRKFDNLTKAERGGLSELDKAGFIKR |
| | QLVETRQITKHVAQILDSRMNTKYDENDKLIREVKVITLKSKLVSDFR |
| | KDFQFYKVREINNYHHAHDAYLNAVVGTALIKKYPKLESEFVYGDYK |
| | VYDVRKMIAKSEQEIGKATAKYFFYSNIMNFFKTEITLANGEIRKRPLIE |
| | TNGETGEIVWDKGRDFATVRKVLSMPQVNIVKKTEVQTGGFSKESILP |
| | KRNSDKLIARKKDWDPKKYGGFDSPTVAYSVLVVAKVEKGKSKKLK |
| | SVKELLGITIMERSSFEKNPIDFLEAKGYKEVKKDLIIKLPKYSLFELEN |
| | GRKRMLASAGELQKGNELALPSKYVNFLYLASHYEKLKGSPEDNEQK |
| | QLFVEQHKHYLDEIIEQISEFSKRVILADANLDKVLSAYNKHRDKPIRE |
| | QAENIIHLFTLTNLGAPAAFKYFDTTIDRKRYTSTKEVLDATLIHQSITG |
| | LYETRIDLSQLGGD (SEQ ID NO: 55) |
| Cas9 nickase | DKKYSIGLDIGTNSVGWAVITDEYKVPSKKFKVLGNTDRHSIKKNLIG |
| (Met minus) | ALLFDSGETAEATRLKRTARRRYTRRKNRICYLQEIFSNEMAKVDDSF |
| Streptococcus | FHRLEESFLVEEDKKHERHPIFGNIVDEVAYHEKYPTIYHLRKKLVDST |
| pyogenes | DKADLRLIYLALAHMIKFRGHFLIEGDLNPDNSDVDKLFIQLVQTYNQ |
| Q99ZW2 | LFEENPINASGVDAKAILSARLSKSRRLENLIAQLPGEKKNGLFGNLIAL |
| Cas9 with | SLGLTPNFKSNFDLAEDAKLQLSKDTYDDDLDNLLAQIGDQYADLFLA |
| R863X, | AKNLSDAILLSDILRVNTEITKAPLSASMIKRYDEHHQDLTLLKALVRQ |
| wherein X is | QLPEKYKEIFFDQSKNGYAGYIDGGASQEEFYKFIKPILEKMDGTEELL |
| any alternate | VKLNREDLLRKQRTFDNGSlPHQIHLGELHAILRRQEDFYPFLKDNREK |
| amino acid | IEKILTFRIPYYVGPLARGNSRFAWMTRKSEETITPWNFEEVVDKGASA |
| | QSFIERMTNFDKNLPNEKVLPKHSLLYEYFTVYNELTKVKYVTEGMR |
| | KPAFLSGEQKKAIVDLLFKTNRKVTVKQLKEDYFKKIECFDSVETSGVE |
| | DRFNASLGTYHDLLKIIKDKDFLDNEENEDILEDIVLTLTLFEDREMIEE |
| | RLKTYAHLFDDKVMKQLKRRRYTGWGRLSRKLINGIRDKQSGKTILD |
| | FLKSDGFANRNFMQLIHDDSLTFKEDIQKAQVSGQGDSLHEHIANLAG |
| | SPAIKKGILQTVKVVDELVKVMGRHKPENIVIEMARENQTTQKGQKNS |
| | RERMKRIEEGIKELGSQILKEHPVENTQLQNEKLYLYYLQNGRDMYV |
| | DQELDINRLSDYDVDHIVPQSFLKDDSIDNKVLTRSDKNXGKSDNVPS |
| | EEVVKKMKNYWRQLLNAKLITQRKFDNLTKAERGGLSELDKAGFIKR |
| | QLVETRQITKHVAQILDSRMNTKYDENDKLIREVKVITLKSKLVSDFR |
| | KDFQFYKVREINNYHHAHDAYLNAVVGTALIKKYPKLESEFVYGDYK |
| | VYDVRKMIAKSEQEIGKATAKYFFYSNIMNFFKTEITLANGEIRKRPLIE |
| | TNGETGEIVWDKGRDFATVRKVLSMPQVNIVKKTEVQTGGFSKESILP |
| | KRNSDKLIARKKDWDPKKYGGFDSPTVAYSVLVVAKVEKGKSKKLK |
| | SVKELLGITIMERSSFEKNPIDFLEAKGYKEVKKDLIIKLPKYSLFELEN |
| | GRKRMLASAGELQKGNELALPSKYVNFLYLASHYEKLKGSPEDNEQK |
| | QLFVEQHKHYLDEIIEQISEFSKRVILADANLDKVLSAYNKHRDKPIRE |
| | QAENIIHLFTLTNLGAPAAFKYFDTTIDRKRYTSTKEVLDATLIHQSITG |
| | LYETRIDLSQLGGD (SEQ ID NO: 56) |
| Cas9 nickase | DKKYSIGLDIGTNSVGWAVITDEYKVPSKKFKVLGNTDRHSIKKNLIG |
| (Met minus) | ALLFDSGETAEATRLKRTARRRYTRRKNRICYLQEIFSNEMAKVDDSF |
| Streptococcus | FHRLEESFLVEEDKKHERHPIFGNIVDEVAYHEKYPTIYHLRKKLVDST |
| pyogenes | DKADLRLIYLALAHMIKFRGHFLIEGDLNPDNSDVDKLFIQLVQTYNQ |
| Q99ZW2 | LFEENPINASGVDAKAILSARLSKSRRLENLIAQLPGEKKNGLFGNLIAL |
| Cas9 with | SLGLTPNFKSNFDLAEDAKLQLSKDTYDDDLDNLLAQIGDQYADLFLA |
| R863A | AKNLSDAILLSDILRVNTEITKAPLSASMIKRYDEHHQDLTLLKALVRQ |
| | QLPEKYKEIFFDQSKNGYAGYIDGGASQEEFYKFIKPILEKMDGTEELL |
| | VKLNREDLLRKQRTFDNGSIPHQIHLGELHAILRRQEDFYPFLKDNREK |
| | IEKILTFRIPYYVGPLARGNSRFAWMTRKSEETITPWNFEEVVDKGASA |
| | QSFIERMTNFDKNLPNEKVLPKHSLLYEYFTVYNELTKVKYVTEGMR |
| | KPAFLSGEQKKAIVDLLFKTNRKVTVKQLKEDYFKKIECFDSVETSGVE |
| | DRFNASLGTYHDLLKIIKDKDFLDNEENEDILEDIVLTLTLFEDREMIEE |
| | RLKTYAHLFDDKVMKQLKRRRYTGWGRLSRKLINGIRDKQSGKTILD |
| | FLKSDGFANRNFMQLIHDDSLTFKEDIQKAQVSGQGDSLHEHIANLAG |
| | SPAIKKGILQTVKVVDELVKVMGRHKPENIVIEMARENQTTQKGQKNS |
| | RERMKRIEEGIKELGSQILKEHPVENTQLQNEKLYLYYLQNGRDMYV |
| | DQELDINRLSDYDVDHIVPQSFLKDDSIDNKVLTRSDKNAGKSDNVPS |
| | EEVVKKMKNYWRQLLNAKLITQRKFDNLTKAERGGLSELDKAGFIKR |
| | QLVETRQITKHVAQILDSRMNTKYDENDKLIREVKVITLKSKLVSDFR |
| | KDFQFYKVREINNYHHAHDAYLNAVVGTALIKKYPKLESEFVYGDYK |
| | VYDVRKMIAKSEQEIGKATAKYFFYSNIMNFFKTEITLANGEIRKRPLIE |
| | TNGETGEIVWDKGRDFATVRKVLSMPQVNIVKKTEVQTGGFSKESILP |
| | KRNSDKLIARKKDWDPKKYGGFDSPTVAYSVLVVAKVEKGKSKKLK |
| | SVKELLGITIMERSSFEKNPIDFLEAKGYKEVKKDLIIKLPKYSLFELEN |
| | GRKRMLASAGELQKGNELALPSKYVNFLYLASHYEKLKGSPEDNEQK |
| | QLFVEQHKHYLDEIIEQISEFSKRVILADANLDKVLSAYNKHRDKPIRE |
| | QAENIIHLFTLTNLGAPAAFKYFDTTIDRKRYTSTKEVLDATLIHQSITG |
| | LYETRIDLSQLGGD (SEQ ID NO: 57) |

[0338] E. Other Cas9 Variants

[0339] Besides dead Cas9 and Cas9 nickase variants, the Cas9 proteins used herein may also include other “Cas9 variants” having at least about 70% identical, at least about 80% identical, at least about 90% identical, at least about 95% identical, at least about 96% identical, at least about 97% identical, at least about 98% identical, at least about 99% identical, at least about 99.5% identical, or at least about 99.9% identical to any reference Cas9 protein, including any wild type Cas9, or mutant Cas9 (e.g., a dead Cas9 or Cas9 nickase), or fragment Cas9, or circular permutant Cas9, or other variant of Cas9 disclosed herein or known in the art. In some embodiments, a Cas9 variant may have 1, 2, 3, 4, 5, 6, 7, 8, 9, 10, 11, 12, 13, 14, 15, 16, 17, 18, 19, 20, 21, 22, 21, 24, 25, 26, 27, 28, 29, 30, 31, 32, 33, 34, 35, 36, 37, 38, 39, 40, 41, 42, 43, 44, 45, 46, 47, 48, 49, 50 or more amino acid changes compared to a reference Cas9. In some embodiments, the Cas9 variant comprises a fragment of a reference Cas9 (e.g., a gRNA binding domain or a DNA-cleavage domain), such that the fragment is at least about 70% identical, at least about 80% identical, at least about 90% identical, at least about 95% identical, at least about 96% identical, at least about 97% identical, at least about 98% identical, at least about 99% identical, at least about 99.5% identical, or at least about 99.9% identical to the corresponding fragment of wild type Cas9. In some embodiments, the fragment is is at least 30%, at least 35%, at least 40%, at least 45%, at least 50%, at least 55%, at least 60%, at least 65%, at least 70%, at least 75%, at least 80%, at least 85%, at least 90%, at least 95% identical, at least 96%, at least 97%, at least 98%, at least 99%, or at least 99.5% of the amino acid length of a corresponding wild type Cas9 (e.g., SEQ ID NO: 18).

[0340] In some embodiments, the disclosure also may utilize Cas9 fragments which retain their functionality and which are fragments of any herein disclosed Cas9 protein. In some embodiments, the Cas9 fragment is at least 100 amino acids in length. In some embodiments, the fragment is at least 100, 150, 200, 250, 300, 350, 400, 450, 500, 550, 600, 650, 700, 750, 800, 850, 900, 950, 1000, 1050, 1100, 1150, 1200, 1250, or at least 1300 amino acids in length.

[0341] In various embodiments, the prime editors disclosed herein may comprise one of the Cas9 variants described as follows, or a Cas9 variant thereof having at least about 70% identical, at least about 80% identical, at least about 90% identical, at least about 95% identical, at least about 96% identical, at least about 97% identical, at least about 98% identical, at least about 99% identical, at least about 99.5% identical, or at least about 99.9% identical to any reference Cas9 variants.

[0342] F. Small-Sized Cas9 Variants

[0343] In some embodiments, the prime editors contemplated herein can include a Cas9 protein that is of smaller molecular weight than the canonical SpCas9 sequence. In some embodiments, the smaller-sized Cas9 variants may facilitate delivery to cells, e.g., by an expression vector, nanoparticle, or other means of delivery. In certain embodiments, the smaller-sized Cas9 variants can include enzymes categorized as type II enzymes of the Class 2 CRISPR-Cas systems. In some embodiments, the smaller-sized Cas9 variants can include enzymes categorized as type V enzymes of the Class 2 CRISPR-Cas systems. In other embodiments, the smaller-sized Cas9 variants can include enzymes categorized as type VI enzymes of the Class 2 CRISPR-Cas systems.

[0344] The canonical SpCas9 protein is 1368 amino acids in length and has a predicted molecular weight of 158 kilodaltons. The term “small-sized Cas9 variant”, as used herein, refers to any Cas9 variant—naturally occurring, engineered, or otherwise—that is less than at least 1300 amino acids, or at least less than 1290 amino acids, or than less than 1280 amino acids, or less than 1270 amino acid, or less than 1260 amino acid, or less than 1250 amino acids, or less than 1240 amino acids, or less than 1230 amino acids, or less than 1220 amino acids, or less than 1210 amino acids, or less than 1200 amino acids, or less than 1190 amino acids, or less than 1180 amino acids, or less than 1170 amino acids, or less than 1160 amino acids, or less than 1150 amino acids, or less than 1140 amino acids, or less than 1130 amino acids, or less than 1120 amino acids, or less than 1110 amino acids, or less than 1100 amino acids, or less than 1050 amino acids, or less than 1000 amino acids, or less than 950 amino acids, or less than 900 amino acids, or less than 850 amino acids, or less than 800 amino acids, or less than 750 amino acids, or less than 700 amino acids, or less than 650 amino acids, or less than 600 amino acids, or less than 550 amino acids, or less than 500 amino acids, but at least larger than about 400 amino acids and retaining the required functions of the Cas9 protein. The Cas9 variants can include those categorized as type II, type V, or type VI enzymes of the Class 2 CRISPR-Cas system.

[0345] In various embodiments, the prime editors disclosed herein may comprise one of the small-sized Cas9 variants described as follows, or a Cas9 variant thereof having at least about 70% identical, at least about 80% identical, at least about 90% identical, at least about 95% identical, at least about 96% identical, at least about 97% identical, at least about 98% identical, at least about 99% identical, at least about 99.5% identical, or at least about 99.9% identical to any reference small-sized Cas9 protein.

| Description | Sequence | SEQ ID NO: |
|---|---|---|
| SaCas9 | MGKRNYILGLDIGITSVGYGIIDYETRDVIDAGVRLFKEA | SEQ ID NO: 58 |
| Staphylococcus | NVENNEGRRSKRGARRLKRRRRHRIQRVKKLLFDYNLL | |
| aureus | TDHSELSGINPYEARVKGLSQKLSEEEFSAALLHLAKRRG | |
| 1053 AA | VHNVNEVEEDTGNELSTKEQISRNSKALEEKYVAELQLE | |
| 123 kDa | RLKKDGEVRGSINRFKTSDYVKEAKQLLKVQKAYHQLD | |
| | QSFIDTYIDLLETRRTYYEGPGEGSPFGWKDIKEWYEML | |
| | MGHCTYFPEELRSVKYAYNADLYNALNDLNNLVITRDE | |
| | NEKLEYYEKFQIIENVFKQKKKPTLKQIAKEILVNEEDIK | |
| | GYRVTSTGKPEFTNLKVYHDIKDITARKEIIENAELLDQIA | |
| | KILTIYQSSEDIQEELTNLNSELTQEEIEQISNLKGYTGTHN | |
| | LSLKAINLILDELWHTNDNQIAIFNRLKLVPKKVDLSQQK | |
| | EIPTTLVDDFILSPVVKRSFIQSIKVINAIIKKYGLPNDIIIEL | |
| | AREKNSKDAQKMINEMQKRNRQTNERIEEIIRTTGKENA | |
| | KYLIEKIKLHDMQEGKCLYSLEAIPLEDLLNNPFNYEVDH | |
| | IIPRSVSFDNSFNNKVLVKQEENSKKGNRTPFQYLSSSDS | |
| | KISYETFKKHILNLAKGKGRISKTKKEYLLEERDINRFSV | |
| | QKDFINRNLVDTRYATRGLMNLLRSYFRVNNLDVKVKSI | |
| | NGGFTSFLRRKWKFKKERNKGYKHHAEDALIIANADFIF | |
| | KEWKKLDKAKKVMENQMFEEKQAESMPEIETEQEYKEI | |
| | FITPHQIKHIKDFKDYKYSHRVDKKPNRKLINDTLYSTRK | |
| | DDKGNTLIVNNLNGLYDKDNDKLKKLINKSPEKLLMYH | |
| | HDPQTYQKLKLIMEQYGDEKNPLYKYYEETGNYLTKYS | |
| | KKDNGPVIKKIKYYGNKLNAHLDITDDYPNSRNKVVKLS | |
| | LKPYRFDVYLDNGVYKFVTVKNLDVIKKENYYEVNSKC | |
| | YEEAKKLKKISNQAEFIASFYKNDLIKINGELYRVIGVNN | |
| | DLLNRIEVNMIDITYREYLENMNDKRPPHIIKTIASKTQSI | |
| | KKYSTDILGNLYEVKSKKHPQIIKK | |
| NmeCas9 | MAAFKPNSINYILGLDIGIASVGWAMVEIDEEENPIRLIDL | SEQ ID NO: 59 |
| N. | GVRVFERAEVPKTGDSLAMARRLARSVRRLTRRRAHRL | |
| meningitidis | LRTRRLLKREGVLQAANFDENGLIKSLPNTPWQLRAAAL | |
| 1083 AA | DRKLTPLEWSAVLLHLIKHRGYLSQRKNEGETADKELGA | |
| 124.5 kDa | LLKGVAGNAHALQTGDFRTPAELALNKFEKESGHIRNQR | |
| | SDYSHTFSRKDLQAELILLFEKQKEFGNPHVSGGLKEGIE | |
| | TLLMTQRPALSGDAVQKMLGHCTFEPAEPKAAKNTYTA | |
| | ERFIWLTKLNNLRILEQGSERPLTDTERATLMDEPYRKSK | |
| | LTYAQARKLLGLEDTAFFKGLRYGKDNAEASTLMEMKA | |
| | YHAISRALEKEGLKDKKSPLNLSPELQDEIGTAFSLFKTD | |
| | EDITGRLKDRIQPEILEALLKHISFDKFVQISLKALRRIVPL | |
| | MEQGKRYDEACAEIYGDHYGKKNTEEKIYLPPIPADEIR | |
| | NPVVLRALSQARKVINGVVRRYGSPARIHIETAREVGKSF | |
| | KDRKEIEKRQEENRKDREKAAAKFREYFPNFVGEPKSKD | |
| | ILKLRLYEQQHGKCLYSGKEINLGRLNEKGYVEIDAALPF | |
| | SRTWDDSFNNKVLVLGSENQNKGNQTPYEYFNGKDNSR | |
| | EWQEFKARVETSRFPRSKKQRILLQKFDEDGFKERNLND | |
| | TRYVNRFLCQFVADRMRLTGKGKKRVFASNGQITNLLR | |
| | GFWGLRKVRAENDRHHALDAVVVACSTVAMQQKITRF | |
| | VRYKEMNAFDGKTIDKETGEVLHQKTHFPQPWEFFAQE | |
| | VMIRVFGKPDGKPEFEEADTLEKLRTLLAEKLSSRPEAVH | |
| | EYVTPLFVSRAPNRKMSGQGHMETVKSAKRLDEGVSVL | |
| | RVPLTQLKLKDLEKMVNREREPKLYEALKARLEAHKDD | |
| | PAKAFAEPFYKYDKAGNRTQQVKAVRVEQVQKTGVWV | |
| | RNHNGIADNATMVRVDVFEKGDKYYLVPIYSWQVAKGI | |
| | LPDRAVVQGKDEEDWQLIDDSFNFKFSLHPNDLVEVITK | |
| | KARMFGYFASCHRGTGNINIRIHDLDHKIGKNGILEGIGV | |
| | KTALSFQKYQIDELGKEIRPCRLKKRPPVR | |
| CjCas9 | MARILAFDIGISSIGWAFSENDELKDCGVRIFTKVENPKT | SEQ ID NO: 60 |
| C. jejuni | GESLALPRRLARSARKRLARRKARLNHLKHLIANEFKLN | |
| 984 AA | YEDYQSFDESLAKAYKGSLISPYELRFRALNELLSKQDFA | |
| 114.9 kDa | RVILHIAKRRGYDDIKNSDDKEKGAILKAIKQNEEKLAN | |
| | YQSVGEYLYKEYFQKFKENSKEFTNVRNKKESYERCIAQ | |
| | SFLKDELKLIFKKQREFGFSFSKKFEEEVLSVAFYKRALK | |
| | DFSHLVGNCSFFTDEKRAPKNSPLAFMFVALTRIINLLNN | |
| | LKNTEGILYTKDDLNALLNEVLKNGTLTYKQTKKLLGLS | |
| | DDYEFKGEKGTYFIEFKKYKEFIKALGEHNLSQDDLNEIA | |
| | KDITLIKDEIKLKKALAKYDLNQNQIDSLSKLEFKDHLNIS | |
| | FKALKLVTPLMLEGKKYDEACNELNLKVAINEDKKDFLP | |
| | AFNETYYKDEVTNPVVLRAIKEYRKVLNALLKKYGKVH | |
| | KINIELAREVGKNHSQRAKIEKEQNENYKAKKDAELECE | |
| | KLGLKINSKNILKLRLFKEQKEFCAYSGEKIKISDLQDEK | |
| | MLEIDHIYPYSRSFDDSYMNKVLVFTKQNQEKLNQTPFE | |
| | AFGNDSAKWQKIEVLAKNLPTKKQKRILDKNYKDKEQK | |
| | NFKDRNLNDTRYIARLVLNYTKDYLDFLPLSDDENTKLN | |
| | DTQKGSKVHVEAKSGMLTSALRHTWGFSAKDRNNHLH | |
| | HAIDAVIIAYANNSIVKAFSDFKKEQESNSAELYAKKISEL | |
| | DYKNKRKFFEPFSGFRQKVLDKIDEIFVSKPERKKPSGAL | |
| | HEETFRKEEEFYQSYGGKEGVLKALELGKIRKVNGKIVK | |
| | NGDMFRVDIFKHKKTNKFYAVPIYTMDFALKVLPNKAV | |
| | ARSKKGEIKDWILMDENYEFCFSLYKDSLILIQTKDMQEP | |
| | EFVYYNAFTSSTVSLIVSKHDNKFETLSKNQKILFKNANE | |
| | KEVIAKSIGIQNLKVFEKYIVSALGEVTKAEFRQREDFKK | |
| GeoCas9 | MRYKIGLDIGITSVGWAVMNLDIPRIEDLGVRIFDRAENP | SEQ ID NO: 61 |
| G. | QTGESLALPRRLARSARRRLRRRKHRLERIRRLVIREGILT | |
| stearothermo- | KEELDKLFEEKHEIDVWQLRVEALDRKLNNDELARVLL | |
| philus | HLAKRRGFKSNRKSERSNKENSTMLKHIEENRAILSSYRT | |
| 1087 AA | VGEMIVKDPKFALHKRNKGENYTNTIARDDLEREIRLIFS | |
| 127 kDa | KQREFGNMSCTEEFENEYITIWASQRPVASKDDIEKKVGF | |
| | CTFEPKEKRAPKATYTFQSFIAWEHINKLRLISPSGARGLT | |
| | DEERRLLYEQAFQKNKITYHDIRTLLHLPDDTYFKGIVYD | |
| | RGESRKQNENIRFLELDAYHQIRKAVDKVYGKGKSSSFL | |
| | PIDFDTFGYALTLFKDDADIHSYLRNEYEQNGKRMPNLA | |
| | NKVYDNELIEELLNLSFTKFGHLSLKALRSILPYMEQGEV | |
| | YSSACERAGYTFTGPKKKQKTMLLPNIPPIANPVVMRAL | |
| | TQARKVVNAIIKKYGSPVSIHIELARDLSQTFDERRKTKK | |
| | EQDENRKKNETAIRQLMEYGLTLNPTGHDIVKFKLWSEQ | |
| | NGRCAYSLQPIEIERLLEPGYVEVDHVIPYSRSLDDSYTN | |
| | KVLVLTRENREKGNRIPAEYLGVGTERWQQFETFVLTNK | |
| | QFSKKKRDRLLRLHYDENEETEFKNRNLNDTRYISRFFA | |
| | NFIREHLKFAESDDKQKVYTVNGRVTAHLRSRWEFNKN | |
| | REESDLHHAVDAVIVACTTPSDIAKVTAFYQRREQNKEL | |
| | AKKTEPHFPQPWPHFADELRARLSKHPKESIKALNLGNY | |
| | DDQKLESLQPVFVSRMPKRSVTGAAHQETLRRYVGIDER | |
| | SGKIQTVVKTKLSEIKLDASGHFPMYGKESDPRTYEAIRQ | |
| | RLLEHNNDPKKAFQEPLYKPKKNGEPGPVIRTVKIIDTKN | |
| | QVIPLNDGKTVAYNSNIVRVDVFEKDGKYYCVPVYTMD | |
| | IMKGILPNKAIEPNKPYSEWKEMTEDYTFRFSLYPNDLIRI | |
| | ELPREKTVKTAAGEEINVKDVFVYYKTIDSANGGLELISH | |
| | DHRFSLRGVGSRTLKRFEKYQVDVLGNIYKVRGEKRVG | |
| | LASSAHSKPGKTIRPLQSTRD | |
| LbaCas12a | MSKLEKFTNCYSLSKTLRFKAIPVGKTQENIDNKRLLVED | SEQ ID NO: 62 |
| L. bacterium | EKRAEDYKGVKKLLDRYYLSFINDVLHSIKLKNLNNYIS | |
| 1228 AA | LFRKKTRTEKENKELENLEINLRKEIAKAFKGNEGYKSLF | |
| 143.9 kDa | KKDIIETILPEFLDDKDEIALVNSFNGFTTAFTGFFDNREN | |
| | MFSEEAKSTSIAFRCINENLTRYISNMDIFEKVDAIFDKHE | |
| | VQEIKEKILNSDYDVEDFFEGEFFNFVLTQEGIDVYNAIIG | |
| | GFVTESGEKIKGLNEYINLYNQKTKQKLPKFKPLYKQVL | |
| | SDRESLSFYGEGYTSDEEVLEVFRNTLNKNSEIFSSIKKLE | |
| | KLFKNFDEYSSAGIFVKNGPAISTISKDIFGEWNVIRDKW | |
| | NAEYDDIHLKKKAVVTEKYEDDRRKSFKKIGSFSLEQLQ | |
| | EYADADLSVVEKLKEIIIQKVDEIYKVYGSSEKLFDADFV | |
| | LEKSLKKNDAVVAIMKDLLDSVKSFENYIKAFFGEGKET | |
| | NRDESFYGDFVLAYDILLKVDHIYDAIRNYVTQKPYSKD | |
| | KFKLYFQNPQFMGGWDKDKETDYRATILRYGSKYYLAI | |
| | MDKKYAKCLQKIDKDDVNGNYEKINYKLLPGPNKMLPK | |
| | VFFSKKWMAYYNPSEDIQKIYKNGTFKKGDMFNLNDCH | |
| | KLIDFFKDSISRYPKWSNAYDFNFSETEKYKDIAGFYREV | |
| | EEQGYKVSFESASKKEVDKLVEEGKLYMFQIYNKDFSDK | |
| | SHGTPNLHTMYFKLLFDENNHGQIRLSGGAELFMRRASL | |
| | KKEELVVHPANSPIANKNPDNPKKTTTLSYDVYKDKRFS | |
| | EDQYELHIPIAINKCPKNIFKINTEVRVLLKHDDNPYVIGI | |
| | DRGERNLLYIVVVDGKGNIVEQYSLNEIINNFNGIRIKTD | |
| | YHSLLDKKEKERFEARQNWTSIENIKELKAGYISQVVHKI | |
| | CELVEKYDAVIALEDLNSGFKNSRVKVEKQVYQKFEKM | |
| | LIDKLNYMVDKKSNPCATGGALKGYQITNKFESFKSMST | |
| | QNGFIFYIPAWLTSKIDPSTGFVNLLKTKYTSIADSKKFISS | |
| | FDRIMYVPEEDLFEFALDYKNFSRTDADYIKKWKLYSYG | |
| | NRIRIFRNPKKNNVFDWEEVCLTSAYKELFNKYGINYQQ | |
| | GDIRALLCEQSDKAFYSSFMALMSLMLQMRNSITGRTDV | |
| | DFLISPVKNSDGIFYDSRNYEAQENAILPKNADANGAYNI | |
| | ARKVLWAIGQFKKAEDEKLDKVKIAISNKEWLEYAQTS | |
| | VKH | |
| BhCas12b | MATRSFILKIEPNEEVKKGLWKTHEVLNHGIAYYMNILK | SEQ ID NO: 63 |
| B. hisashii | LIRQEAIYEHHEQDPKNPKKVSKAEIQAELWDFVLKMQK | |
| 1108 AA | CNSFTHEVDKDEVFNILRELYEELVPSSVEKKGEANQLSN | |
| 130.4 kDa | KFLYPLVDPNSQSGKGTASSGRKPRWYNLKIAGDPSWEE | |
| | EKKKWEEDKKKDPLAKILGKLAEYGLIPLFIPYTDSNEPI | |
| | VKEIKWMEKSRNQSVRRLDKDMFIQALERFLSWESWNL | |
| | KVKEEYEKVEKEYKTLEERIKEDIQALKALEQYEKERQE | |
| | QLLRDTLNTNEYRLSKRGLRGWREIIQKWLKMDENEPSE | |
| | KYLEVFKDYQRKHPREAGDYSVYEFLSKKENHFIWRNH | |
| | PEYPYLYATFCEIDKKKKDAKQQATFTLADPINHPLWVR | |
| | FEERSGSNLNKYRILTEQLHTEKLKKKLTVQLDRLIYPTE | |
| | SGGWEEKGKVDIVLLPSRQFYNQIFLDIEEKGKHAFTYK | |
| | DESIKFPLKGTLGGARVQFDRDHLRRYPHKVESGNVGRI | |
| | YFNMTVNIEPTESPVSKSLKIHRDDFPKVVNFKPKELTEW | |
| | IKDSKGKKLKSGIESLEIGLRVMSIDLGQRQAAAASIFEV | |
| | VDQKPDIEGKLFFPIKGTELYAVHRASFNIKLPGETLVKS | |
| | REVLRKAREDNLKLMNQKLNFLRNVLHFQQFEDITEREK | |
| | RVTKWISRQENSDVPLVYQDELIQIRELMYKPYKDWVAF | |
| | LKQLHKRLEVEIGKEVKHWRKSLSDGRKGLYGISLKNID | |
| | EIDRTRKFLLRWSLRPTEPGEVRRLEPGQRFAIDQLNHLN | |
| | ALKEDRLKKMANTIIMHALGYCYDVRKKKWQAKNPAC | |
| | QIILFEDLSNYNPYEERSRFENSKLMKWSRREIPRQVALQ | |
| | GEIYGLQVGEVGAQFSSRFHAKTGSPGIRCSVVTKEKLQ | |
| | DNRFFKNLQREGRLTLDKIAVLKEGDLYPDKGGEKFISLS | |
| | KDRKCVTTHADINAAQNLQKRFWTRTHGFYKVYCKAY | |
| | QVDGQTVYIPESKDQKQKIIEEFGEGYFILKDGVYEWVN | |
| | AGKLKIKKGSSKQSSSELVDSDILKDSFDLASELKGEKLM | |
| | LYRDPSGNVFPSDKWMAAGVFFGKLERILISKLTNQYSIS | |
| | TIEDDSSKQSM | |

[0346] G. Cas9 Equivalents

[0347] In some embodiments, the prime editors described herein can include any Cas9 equivalent. As used herein, the term “Cas9 equivalent” is a broad term that encompasses any napDNAbp protein that serves the same function as Cas9 in the present prime editors despite that its amino acid primary sequence and/or its three-dimensional structure may be different and/or unrelated from an evolutionary standpoint. Thus, while Cas9 equivalents include any Cas9 ortholog, homolog, mutant, or variant described or embraced herein that are evolutionarily related, the Cas9 equivalents also embrace proteins that may have evolved through convergent evolution processes to have the same or similar function as Cas9, but which do not necessarily have any similarity with regard to amino acid sequence and/or three dimensional structure. The prime editors described here embrace any Cas9 equivalent that would provide the same or similar function as Cas9 despite that the Cas9 equivalent may be based on a protein that arose through convergent evolution. For instance, if Cas9 refers to a type II enzyme of the CRISPR-Cas system, a Cas9 equivalent can refer to a type V or type VI enzyme of the CRISPR-Cas system.

[0348] For example, Cas12e (CasX) is a Cas9 equivalent that reportedly has the same function as Cas9 but which evolved through convergent evolution. Thus, the Cas12e (CasX) protein described in Liu et al., “CasX enzymes comprises a distinct family of RNA-guided genome editors,” Nature, 2019, Vol. 566: 218-223, is contemplated to be used with the prime editors described herein. In addition, any variant or modification of Cas12e (CasX) is conceivable and within the scope of the present disclosure.

[0349] Cas9 is a bacterial enzyme that evolved in a wide variety of species. However, the Cas9 equivalents contemplated herein may also be obtained from archaea, which constitute a domain and kingdom of single-celled prokaryotic microbes different from bacteria.

[0350] In some embodiments, Cas9 equivalents may refer to Cas12e (CasX) or Cas12d (CasY), which have been described in, for example, Burstein et al., “New CRISPR-Cas systems from uncultivated microbes.” Cell Res. 2017 Feb. 21. doi: 10.1038/cr.2017.21, the entire contents of which is hereby incorporated by reference. Using genome-resolved metagenomics, a number of CRISPR-Cas systems were identified, including the first reported Cas9 in the archaeal domain of life. This divergent Cas9 protein was found in little-studied nanoarchaea as part of an active CRISPR-Cas system. In bacteria, two previously unknown systems were discovered, CRISPR-Cas12e and CRISPR-Cas12d, which are among the most compact systems yet discovered. In some embodiments, Cas9 refers to Cas12e, or a variant of Cas12e. In some embodiments, Cas9 refers to a Cas12d, or a variant of Cas12d. It should be appreciated that other RNA-guided DNA binding proteins may be used as a nucleic acid programmable DNA binding protein (napDNAbp), and are within the scope of this disclosure. Also see Liu et al., “CasX enzymes comprises a distinct family of RNA-guided genome editors,” Nature, 2019, Vol. 566: 218-223. Any of these Cas9 equivalents are contemplated.

[0351] In some embodiments, the Cas9 equivalent comprises an amino acid sequence that is at least 85%, at least 90%, at least 91%, at least 92%, at least 93%, at least 94%, at least 95%, at least 96%, at least 97%, at least 98%, at least 99%, or at least 99.5% identical to a naturally-occurring Cas12e (CasX) or Cas12d (CasY) protein. In some embodiments, the napDNAbp is a naturally-occurring Cas12e (CasX) or Cas12d (CasY) protein. In some embodiments, the napDNAbp comprises an amino acid sequence that is at least 85%, at least 90%, at least 91%, at least 92%, at least 93%, at least 94%, at least 95%, at least 96%, at least 97%, at least 98%, at least 99%, or at least 99.5% identical to a wild-type Cas moiety or any Cas moiety provided herein.

[0352] In various embodiments, the nucleic acid programmable DNA binding proteins include, without limitation, Cas9 (e.g., dCas9 and nCas9), Cas12e (CasX), Cas12d (CasY), Cas12a (Cpf1), Cas12b1 (C2c1), Cas13a (C2c2), Cas12c (C2c3), Argonaute, and Cas12b1. One example of a nucleic acid programmable DNA-binding protein that has different PAM specificity than Cas9 is Clustered Regularly Interspaced Short Palindromic Repeats from Prevotella and Francisella 1 (i.e, Cas12a (Cpf1)). Similar to Cas9, Cas12a (Cpf1) is also a Class 2 CRISPR effector, but it is a member of type V subgroup of enzymes, rather than the type II subgroup. It has been shown that Cas12a (Cpf1) mediates robust DNA interference with features distinct from Cas9. Cas12a (Cpf1) is a single RNA-guided endonuclease lacking tracrRNA, and it utilizes a T-rich protospacer-adjacent motif (TTN, TTTN, or YTN). Moreover, Cpf1 cleaves DNA via a staggered DNA double-stranded break. Out of 16 Cpf1-family proteins, two enzymes from Acidaminococcus and Lachnospiraceae are shown to have efficient genome-editing activity in human cells. Cpf1 proteins are known in the art and have been described previously, for example Yamano et al., “Crystal structure of Cpf1 in complex with guide RNA and target DNA.” Cell (165) 2016, p. 949-962; the entire contents of which is hereby incorporated by reference.

[0353] In still other embodiments, the Cas protein may include any CRISPR associated protein, including but not limited to, Cas12a, Cas12b1, Cas1, Cas1B, Cas2, Cas3, Cas4, Cas5, Cas6, Cas7, Cas8, Cas9 (also known as Csn1 and Csx12), Cas10, Csy1, Csy2, Csy3, Cse1, Cse2, Csc1, Csc2, Csa5, Csn2, Csm2, Csm3, Csm4, Csm5, Csm6, Cmr1, Cmr3, Cmr4, Cmr5, Cmr6, Csb1, Csb2, Csb3, Csx17, Csx14, Csx10, Csx16, CsaX, Csx3, Csx1, Csx15, Csf1, Csf2, Csf3, Csf4, homologs thereof, or modified versions thereof, and preferably comprising a nickase mutation (e.g., a mutation corresponding to the D10A mutation of the wild type Cas9 polypeptide of SEQ ID NO: 18).

[0354] In various other embodiments, the napDNAbp can be any of the following proteins: a Cas9, a Cas12a (Cpf1), a Cas12e (CasX), a Cas12d (CasY), a Cas12b1 (C2c1), a Cas13a (C2c2), a Cas12c (C2c3), a GeoCas9, a CjCas9, a Cas12g, a Cas12h, a Cas12i, a Cas13b, a Cas13c, a Cas13d, a Cas14, a Csn2, an xCas9, an SpCas9-NG, a circularly permuted Cas9, or an Argonaute (Ago) domain, or a variant thereof.

[0355] Exemplary Cas9 equivalent protein sequences can include the following:

| Description | Sequence |
|---|---|
| AsCas12a | MTQFEGFTNLYQVSKTLRFELIPQGKTLKHIQEQGFIEEDKARNDHYKEL |
| (previously | KPIIDRIYKTYADQCLQLVQLDWENLSAAIDSYRKEKTEETRNALIEEQA |
| known as | TYRNAIHDYFIGRTDNLTDAINKRHAEIYKGLFKAELFNGKVLKQLGTV |
| Cpf1) | TTTEHENALLRSFDKFTTYFSGFYENRKNVFSAEDISTAlPHRIVQDNFPK |
| Acidaminococcus | FKENCHIFTRLITAVPSLREHFENVKKAIGIFVSTSIEEVFSFPFYNQLLTQ |
| sp. | TQIDLYNQLLGGISREAGTEKIKGLNEVLNLAIQKNDETAHIIASLPHRFIP |
| (strain | LFKQILSDRNTLSFILEEFKSDEEVIQSFCKYKTLLRNENVLETAEALFNE |
| BV3L6) | LNSIDLTHIFISHKKLETISSALCDHWDTLRNALYERRISELTGKITKSAKE |
| UniProtKB | KVQRSLKHEDINLQEIISAAGKELSEAFKQKTSEILSHAHAALDQPLPTTL |
| U2UMQ6 | KKQEEKEILKSQLDSLLGLYHLLDWFAVDESNEVDPEFSARLTGIKLEM |
| | EPSLSFYNKARNYATKKPYSVEKFKLNFQMPTLASGWDVNKEKNNGAI |
| | LFVKNGLYYLGIMPKQKGRYKALSFEPTEKTSEGFDKMYYDYFPDAAK |
| | MIPKCSTQLKAVTAHFQTHTTPILLSNNFIEPLEITKEIYDLNNPEKEPKKF |
| | QTAYAKKTGDQKGYREALCKWIDFTRDFLSKYTKTTSIDLSSLRPSSQY |
| | KDLGEYYAELNPLLYHISFQRIAEKEIMDAVETGKLYLFQIYNKDFAKG |
| | HHGKPNLHTLYWTGLFSPENLAKTSIKLNGQAELFYRPKSRMKRMAHR |
| | LGEKMLNKKLKDQKTPIPDTLYQELYDYVNHRLSHDLSDEARALLPNVI |
| | TKEVSHEIIKDRRFTSDKFFFHVPITLNYQAANSPSKFNQRVNAYLKEHP |
| | ETPIIGIDRGERNLIYITVIDSTGKILEQRSLNTIQQFDYQKKLDNREKERV |
| | AARQAWSVVGTIKDLKQGYLSQVIHEIVDLMIHYQAVVVLENLNFGFK |
| | SKRTGIAEKAVYQQFEKMLIDKLNCLVLKDYPAEKVGGVLNPYQLTDQ |
| | FTSFAKMGTQSGFLFYVPAPYTSKIDPLTGFVDPFVWKTIKNHESRKHFL |
| | EGFDFLHYDVKTGDFILHFKMNRNLSFQRGLPGFMPAWDIVFEKNETQF |
| | DAKGTPFIAGKRIVPVIENHRFTGRYRDLYPANELIALLEEKGIVFRDGSN |
| | ILPKLLENDDSHAIDTMVAHRSVLQMRNSNAATGEDYINSPVRDLNGV |
| | CFDSRFQNPEWPMDADANGAYHIALKGQLLLNHLKESKDLKLQNGISN |
| | QDWLAYIQELRN (SEQ ID NO: 64) |
| AsCas12a | MTQFEGFTNLYQVSKTLRFELIPQGKTLKHIQEQGFIEEDKARNDHYKEL |
| nickase | KPIIDRIYKTYADQCLQLVQLDWENLSAAIDSYRKEKTEETRNALIEEQA |
| (e.g., | TYRNAIHDYFIGRTDNLTDAINKRHAEIYKGLFKAELFNGKVLKQLGTV |
| R1226A) | TTTEHENALLRSFDKFTTYFSGFYENRKNVFSAEDISTAIPHRIVQDNFPK |
| | FKENCHIFTRLITAVPSLREHFENVKKAIGIFVSTSIEEVFSFPFYNQLLTQ |
| | TQIDLYNQLLGGISREAGTEKIKGLNEVLNLAIQKNDETAHIIASLPHRFIP |
| | LFKQILSDRNTLSFILEEFKSDEEVIQSFCKYKTLLRNENVLETAEALFNE |
| | LNSIDLTHIFISHKKLETISSALCDHWDTLRNALYERRISELTGKITKSAKE |
| | KVQRSLKHEDINLQEIISAAGKELSEAFKQKTSEILSHAHAALDQPLPTTL |
| | KKQEEKEILKSQLDSLLGLYHLLDWFAVDESNEVDPEFSARLTGIKLEM |
| | EPSLSFYNKARNYATKKPYSVEKFKLNFQMPTLASGWDVNKEKNNGAI |
| | LFVKNGLYYLGIMPKQKGRYKALSFEPTEKTSEGFDKMYYDYFPDAAK |
| | MIPKCSTQLKAVTAHFQTHTTPILLSNNFIEPLEITKEIYDLNNPEKEPKKF |
| | QTAYAKKTGDQKGYREALCKWIDFTRDFLSKYTKTTSIDLSSLRPSSQY |
| | KDLGEYYAELNPLLYHISFQRIAEKEIMDAVETGKLYLFQIYNKDFAKG |
| | HHGKPNLHTLYWTGLFSPENLAKTSIKLNGQAELFYRPKSRMKRMAHR |
| | LGEKMLNKKLKDQKTPIPDTLYQELYDYVNHRLSHDLSDEARALLPNVI |
| | TKEVSHEIIKDRRFTSDKFFFHVPITLNYQAANSPSKFNQRVNAYLKEHP |
| | ETPIIGIDRGERNLIYITVIDSTGKILEQRSLNTIQQFDYQKKLDNREKERV |
| | AARQAWSVVGTIKDLKQGYLSQVIHEIVDLMIHYQAVVVLENLNFGFK |
| | SKRTGIAEKAVYQQFEKMLIDKLNCLVLKDYPAEKVGGVLNPYQLTDQ |
| | FTSFAKMGTQSGFLFYVPAPYTSKIDPLTGFVDPFVWKTIKNHESRKHFL |
| | EGFDFLHYDVKTGDFILHFKMNRNLSFQRGLPGFMPAWDIVFEKNETQF |
| | DAKGTPFIAGKRIVPVIENHRFTGRYRDLYPANELIALLEEKGIVFRDGSN |
| | ILPKLLENDDSHAIDTMVAHRSVLQMANSNAATGEDYINSPVRDLNGV |
| | CFDSRFQNPEWPMDADANGAYHIALKGQLLLNHLKESKDLKLQNGISN |
| | QDWLAYIQELRN (SEQ ID NO: 65) |
| LbCas12a | MNYKTGLEDFIGKESLSKTLRNALIPTESTKIHMEEMGVIRDDELRAEKQ |
| (previously | QELKEIMDDYYRTFIEEKLGQIQGIQWNSLFQKMEETMEDISVRKDLDKI |
| known as | QNEKRKEICCYFTSDKRFKDLFNAKLITDILPNFIKDNKEYTEEEKAEKE |
| Cpf1) | QTRVLFQRFATAFTNYFNQRRNNFSEDNISTAISFRIVNENSEIHLQNMR |
| Lachnospiraceae | AFQRIEQQYPEEVCGMEEEYKDMLQEWQMKHIYSVDFYDRELTQPGIE |
| bacterium | YYNGICGKINEHMNQFCQKNRINKNDFRMKKLHKQILCKKSSYYEIPFR |
| GAM79 | FESDQEVYDALNEFIKTMKKKEIIRRCVHLGQECDDYDLGKIYISSNKYE |
| Ref Seq. | QISNALYGSWDTIRKCIKEEYMDALPGKGEKKEEKAEAAAKKEEYRSIA |
| WP_119623382.1 | DIDKIISLYGSEMDRTISAKKCITEICDMAGQISIDPLVCNSDIKLLQNKEK |
| | TTEIKTILDSFLHVYQWGQTFIVSDIIEKDSYFYSELEDVLEDFEGITTLYN |
| | HVRSYVTQKPYSTVKFKLHFGSPTLANGWSQSKEYDNNAILLMRDQKF |
| | YLGIFNVRNKPDKQIIKGHEKEEKGDYKKMIYNLLPGPSKMLPKVFITSR |
| | SGQETYKPSKHILDGYNEKRHIKSSPKFDLGYCWDLIDYYKECIHKHPD |
| | WKNYDFHFSDTKDYEDISGFYREVEMQGYQIKWTYISADEIQKLDEKG |
| | QIFLFQIYNKDFSVHSTGKDNLHTMYLKNLFSEENLKDIVLKLNGEAELF |
| | FRKASIKTPIVHKKGSVLVNRSYTQTVGNKEIRVSIPEEYYTEIYNYLNHI |
| | GKGKLSSEAQRYLDEGKIKSFTATKDIVKNYRYCCDHYFLHLPITINFKA |
| | KSDVAVNERTLAYIAKKEDIHIIGIDRGERNLLYISVVDVHGNIREQRSFN |
| | IVNGYDYQQKLKDREKSRDAARKNWEEIEKIKELKEGYLSMVIHYIAQL |
| | VVKYNAVVAMEDLNYGFKTGRFKVERQVYQKFETMLIEKLHYLVFKD |
| | REVCEEGGVLRGYQLTYIPESLKKVGKQCGFIFYVPAGYTSKIDPTTGFV |
| | NLFSFKNLTNRESRQDFVGKFDEIRYDRDKKMFEFSFDYNNYIKKGTILA |
| | STKWKVYTNGTRLKRIVVNGKYTSQSMEVELTDAMEKMLQRAGIEYH |
| | DGKDLKGQIVEKGIEAEIIDIFRLTVQMRNSRSESEDREYDRLISPVLNDK |
| | GEFFDTATADKTLPQDADANGAYCIALKGLYEVKQIKENWKENEQFPR |
| | NKLVQDNKTWFDFMQKKRYL (SEQ ID NO: 66) |
| PcCas12a- | MAKNFEDFKRLYSLSKTLRFEAKPIGATLDNIVKSGLLDEDEHRAASYV |
| previously | KVKKLIDEYHKVFIDRVLDDGCLPLENKGNNNSLAEYYESYVSRAQDE |
| known at | DAKKKFKEIQQNLRSVIAKKLTEDKAYANLFGNKLIESYKDKEDKKKII |
| Cpf1 | DSDLIQFINTAESTQLDSMSQDEAKELVKEFWGFVTYFYGFFDNRKNMY |
| Prevotella | TAEEKSTGIAYRLVNENLPKFIDNIEAFNRAITRPEIQENMGVLYSDFSEY |
| copri | LNVESIQEMFQLDYYNMLLTQKQIDVYNAIIGGKTDDEHDVKIKGINEYI |
| Ref Seq. | NLYNQQHKDDKLPKLKALFKQILSDRNAISWLPEEFNSDQEVLNAIKDC |
| WP_119227726.1 | YERLAENVLGDKVLKSLLGSLADYSLDGIFIRNDLQLTDISQKMFGNWG |
| | VIQNAIMQNIKRVAPARKHKESEEDYEKRIAGIFKKADSFSISYINDCLNE |
| | ADPNNAYFVENYFATFGAVNTPTMQRENLFALVQNAYTEVAALLHSDY |
| | PTVKHLAQDKANVSKIKALLDAIKSLQHFVKPLLGKGDESDKDERFYGE |
| | LASLWAELDTVTPLYNMIRNYMTRKPYSQKKIKLNFENPQLLGGWDAN |
| | KEKDYATIILRRNGLYYLAIMDKDSRKLLGKAMPSDGECYEKMVYKFF |
| | KDVTTMIPKCSTQLKDVQAYFKVNTDDYVLNSKAFNKPLTITKEVFDLN |
| | NVLYGKYKKFQKGYLTATGDNVGYTHAVNVWIKFCMDFLNSYDSTCI |
| | YDFSSLKPESYLSLDAFYQDANLLLYKLSFARASVSYINQLVEEGKMYL |
| | FQIYNKDFSEYSKGTPNMHTLYWKALFDERNLADVVYKLNGQAEMFY |
| | RKKSIENTHPTHPANHPILNKNKDNKKKESLFDYDLIKDRRYTVDKFMF |
| | HVPITMNFKSVGSENINQDVKAYLRHADDMHIIGIDRGERHLLYLVVIDL |
| | QGNIKEQYSLNEIVNEYNGNTYHTNYHDLLDVREEERLKARQSWQTIEN |
| | IKELKEGYLSQVIHKITQLMVRYHAIVVLEDLSKGFMRSRQKVEKQVYQ |
| | KFEKMLIDKLNYLVDKKTDVSTPGGLLNAYQLTCKSDSSQKLGKQSGF |
| | LFYIPAWNTSKIDPVTGFVNLLDTHSLNSKEKIKAFFSKFDAIRYNKDKK |
| | WFEFNLDYDKFGKKAEDTRTKWTLCTRGMRIDTFRNKEKNSQWDNQE |
| | VDLTTEMKSLLEHYYIDIHGNLKDAISAQTDKAFFTGLLHILKLTLQMRN |
| | SITGTETDYLVSPVADENGIFYDSRSCGNQLPENADANGAYNIARKGLM |
| | LIEQIKNAEDLNNVKFDISNKAWLNFAQQKPYKNG (SEQ ID NO: 67) |
| ErCas12a- | MFSAKLISDILPEFVIHNNNYSASEKEEKTQVIKLFSRFATSFKDYFKNRA |
| previously | NCFSANDISSSSCHRIVNDNAEIFFSNALVYRRIVKNLSNDDINKISGDMK |
| known at | DSLKEMSLEEIYSYEKYGEFITQEGISFYNDICGKVNLFMNLYCQKNKEN |
| Cpf1 | KNLYKLRKLHKQILCIADTSYEVPYKFESDEEVYQSVNGFLDNISSKHIV |
| Eubacterium | ERLRKIGENYNGYNLDKIYIVSKFYESVSQKTYRDWETINTALEIHYNNI |
| rectale | LPGNGKSKADKVKKAVKNDLQKSITEINELVSNYKLCPDDNIKAETYIH |
| Ref Seq. | EISHILNNFEAQELKYNPEIHLVESELKASELKNVLDVIMNAFHWCSVFM |
| WP_119223642.1 | TEELVDKDNNFYAELEEIYDEIYPVISLYNLVRNYVTQKPYSTKKIKLNF |
| | GIPTLADGWSKSKEYSNNAIILMRDNLYYLGIFNAKNKPDKKIIEGNTSE |
| | NKGDYKKMIYNLLPGPNKMPKVFLSSKTGVETYKPSAYILEGYKQNKH |
| | LKSSKDFDITFCHDLIDYFKNCIAIHPEWKNFGFDFSDTSTYEDISGFYRE |
| | VELQGYKIDWTYISEKDIDLLQEKGQLYLFQIYNKDFSKKSSGNDNLHT |
| | MYLKNLFSEENLKDIVLKLNGEAEIFFRKSSIKNPIIHKKGSILVNRTYEA |
| | EEKDQFGNIQIVRKTIPENIYQELYKYFNDKSDKELSDEAAKLKNVVGH |
| | HEAATNIVKDYRYTYDKYFLHMPITINFKANKTSFINDRILQYIAKEKDL |
| | HVIGIDRGERNLIYVSVIDTCGNIVEQKSFNIVNGYDYQIKLKQQEGARQI |
| | ARKEWKEIGKIKEIKEGYLSLVIHEISKMVIKYNAIIAMEDLSYGFKKGRF |
| | KVERQVYQKFETMLINKLNYLVFKDISITENGGLLKGYQLTYIPDKLKN |
| | VGHQCGCIFYVPAAYTSKIDPTTGFVNIFKFKDLTVDAKREFIKKFDSIRY |
| | DSDKNLFCFTFDYNNFITQNTVMSKSSWSVYTYGVRIKRRFVNGRFSNE |
| | SDTIDITKDMEKTLEMTDINWRDGHDLRQDIIDYEIVQHIFEIFKLTVQM |
| | RNSLSELEDRDYDRLISPVLNENNIFYDSAKAGDALPKDADANGAYCIA |
| | LKGLYEIKQITENWKEDGKFSRDKLKISNKDWFDFIQNKRYL (SEQ ID |
| | NO: 68) |
| CsCas12a- | MNYKTGLEDFIGKESLSKTLRNALIPTESTKIHMEEMGVIRDDELRAEKQ |
| previously | QELKEIMDDYYRAFIEEKLGQIQGIQWNSLFQKMEETMEDISVRKDLDKI |
| known at | QNEKRKEICCYFTSDKRFKDLFNAKLITDILPNFIKDNKEYTEEEKAEKE |
| Cpf1 | QTRVLFQRFATAFTNYFNQRRNNFSEDNISTAISFRIVNENSEIHLQNMR |
| Clostridium | AFQRIEQQYPEEVCGMEEEYKDMLQEWQMKHIYLVDFYDRVLTQPGIE |
| sp. AF34- | YYNGICGKINEHMNQFCQKNRINKNDFRMKKLHKQILCKKSSYYEIPFR |
| 10BH | FESDQEVYDALNEFIKTMKEKEIICRCVHLGQKCDDYDLGKIYISSNKYE |
| Ref Seq. | QISNALYGSWDTIRKCIKEEYMDALPGKGEKKEEKAEAAAKKEEYRSIA |
| WP_118538418.1 | DIDKIISLYGSEMDRTISAKKCITEICDMAGQISTDPLVCNSDIKLLQNKE |
| | KTTEIKTILDSFLHVYQWGQTFIVSDIIEKDSYFYSELEDVLEDFEGITTLY |
| | NHVRSYVTQKPYSTVKFKLHFGSPTLANGWSQSKEYDNNAILLMRDQK |
| | FYLGIFNVRNKPDKQIIKGHEKEEKGDYKKMIYNLLPGPSKMLPKVFITS |
| | RSGQETYKPSKHILDGYNEKRHIKSSPKFDLGYCWDLIDYYKECIHKHP |
| | DWKNYDFHFSDTKDYEDISGFYREVEMQGYQIKWTYISADEIQKLDEK |
| | GQIFLFQIYNKDFSVHSTGKDNLHTMYLKNLFSEENLKDIVLKLNGEAEL |
| | FFRKASIKTPVVHKKGSVLVNRSYTQTVGDKEIRVSIPEEYYTEIYNYLN |
| | HIGRGKLSTEAQRYLEERKIKSFTATKDIVKNYRYCCDHYFLHLPITINFK |
| | AKSDIAVNERTLAYIAKKEDIHIIGIDRGERNLLYISVVDVHGNIREQRSF |
| | NIVNGYDYQQKLKDREKSRDAARKNWEEIEKIKELKEGYLSMVIHYIAQ |
| | LVVKYNAVVAMEDLNYGFKTGRFKVERQVYQKFETMLIEKLHYLVFK |
| | DREVCEEGGVLRGYQLTYIPESLKKVGKQCGFIFYVPAGYTSKIDPTTGF |
| | VNLFSFKNLTNRESRQDFVGKFDEIRYDRDKKMFEFSFDYNNYIKKGTM |
| | LASTKWKVYTNGTRLKRIVVNGKYTSQSMEVELTDAMEKMLQRAGIE |
| | YHDGKDLKGQIVEKGIEAEIIDIFRLTVQMRNSRSESEDREYDRLISPVLN |
| | DKGEFFDTATADKTLPQDADANGAYCIALKGLYEVKQIKENWKENEQF |
| | PRNKLVQDNKTWFDFMQKKRYL (SEQ ID NO: 69) |
| BhCas12b | MATRSFILKIEPNEEVKKGLWKTHEVLNHGIAYYMNILKLIRQEAIYEHH |
| Bacillus | EQDPKNPKKVSKAEIQAELWDFVLKMQKCNSFTHEVDKDEVFNILREL |
| hisashii | YEELVPSSVEKKGEANQLSNKFLYPLVDPNSQSGKGTASSGRKPRWYNL |
| Ref Seq. | KIAGDPSWEEEKKKWEEDKKKDPLAKILGKLAEYGLIPLFIPYTDSNEPI |
| WP_095142515.1 | VKEIKWMEKSRNQSVRRLDKDMFIQALERFLSWESWNLKVKEEYEKVE |
| | KEYKTLEERIKEDIQALKALEQYEKERQEQLLRDTLNTNEYRLSKRGLR |
| | GWREIIQKWLKMDENEPSEKYLEVFKDYQRKHPREAGDYSVYEFLSKK |
| | ENHFIWRNHPEYPYLYATFCEIDKKKKDAKQQATFTLADPINHPLWVRF |
| | EERSGSNLNKYRILTEQLHTEKLKKKLTVQLDRLIYPTESGGWEEKGKV |
| | DIVLLPSRQFYNQIFLDIEEKGKHAFTYKDESIKFPLKGTLGGARVQFDR |
| | DHLRRYPHKVESGNVGRIYFNMTVNIEPTESPVSKSLKIHRDDFPKVVNF |
| | KPKELTEWIKDSKGKKLKSGIESLEIGLRVMSIDLGQRQAAAASIFEVVD |
| | QKPDIEGKLFFPIKGTELYAVHRASFNIKLPGETLVKSREVLRKAREDNL |
| | KLMNQKLNFLRNVLHFQQFEDITEREKRVTKWISRQENSDVPLVYQDEL |
| | IQIRELMYKPYKDWVAFLKQLHKRLEVEIGKEVKHWRKSLSDGRKGLY |
| | GISLKNIDEIDRTRKFLLRWSLRPTEPGEVRRLEPGQRFAIDQLNHLNALK |
| | EDRLKKMANTIIMHALGYCYDVRKKKWQAKNPACQIILFEDLSNYNPY |
| | EERSRFENSKLMKWSRREIPRQVALQGEIYGLQVGEVGAQFSSRFHAKT |
| | GSPGIRCSVVTKEKLQDNRFFKNLQREGRLTLDKIAVLKEGDLYPDKGG |
| | EKFISLSKDRKCVTTHADINAAQNLQKRFWTRTHGFYKVYCKAYQVDG |
| | QTVYIPESKDQKQKIIEEFGEGYFILKDGVYEWVNAGKLKIKKGSSKQSS |
| | SELVDSDILKDSFDLASELKGEKLMLYRDPSGNVFPSDKWMAAGVFFG |
| | KLERILISKLTNQYSISTIEDDSSKQSM (SEQ ID NO: 70) |
| ThCas12b | MSEKTTQRAYTLRLNRASGECAVCQNNSCDCWHDALWATHKAVNRG |
| Thermomonas | AKAFGDWLLTLRGGLCHTLVEMEVPAKGNNPPQRPTDQERRDRRVLLA |
| hydrothermalis | LSWLSVEDEHGAPKEFIVATGRDSADDRAKKVEEKLREILEKRDFQEHEI |
| Ref Seq. | DAWLQDCGPSLKAHIREDAVWVNRRALFDAAVERIKTLTWEEAWDFL |
| WP_072754838 | EPFFGTQYFAGIGDGKDKDDAEGPARQGEKAKDLVQKAGQWLSARFGI |
| | GTGADFMSMAEAYEKIAKWASQAQNGDNGKATIEKLACALRPSEPPTL |
| | DTVLKCISGPGHKSATREYLKTLDKKSTVTQEDLNQLRKLADEDARNC |
| | RKKVGKKGKKPWADEVLKDVENSCELTYLQDNSPARHREFSVMLDHA |
| | ARRVSMAHSWIKKAEQRRRQFESDAQKLKNLQERAPSAVEWLDRFCES |
| | RSMTTGANTGSGYRIRKRAIEGWSYVVQAWAEASCDTEDKRIAAARKV |
| | QADPEIEKFGDIQLFEALAADEAICVWRDQEGTQNPSILIDYVTGKTAEH |
| | NQKRFKVPAYRHPDELRHPVFCDFGNSRWSIQFAIHKEIRDRDKGAKQD |
| | TRQLQNRHGLKMRLWNGRSMTDVNLHWSSKRLTADLALDQNPNPNPT |
| | EVTRADRLGRAASSAFDHVKIKNVFNEKEWNGRLQAPRAELDRIAKLE |
| | EQGKTEQAEKLRKRLRWYVSFSPCLSPSGPFIVYAGQHNIQPKRSGQYA |
| | PHAQANKGRARLAQLILSRLPDLRILSVDLGHRFAAACAVWETLSSDAF |
| | RREIQGLNVLAGGSGEGDLFLHVEMTGDDGKRRTVVYRRIGPDQLLDN |
| | TPHPAPWARLDRQFLIKLQGEDEGVREASNEELWTVHKLEVEVGRTVP |
| | LIDRMVRSGFGKTEKQKERLKKLRELGWISAMPNEPSAETDEKEGEIRSI |
| | SRSVDELMSSALGTLRLALKRHGNRARIAFAMTADYKPMPGGQKYYFH |
| | EAKEASKNDDETKRRDNQIEFLQDALSLWHDLFSSPDWEDNEAKKLWQ |
| | NHIATLPNYQTPEEISAELKRVERNKKRKENRDKLRTAAKALAENDQLR |
| | QHLHDTWKERWESDDQQWKERLRSLKDWIFPRGKAEDNPSIRHVGGLS |
| | ITRINTISGLYQILKAFKMRPEPDDLRKNIPQKGDDELENFNRRLLEARDR |
| | LREQRVKQLASRIIEAALGVGRIKIPKNGKLPKRPRTTVDTPCHAVVIESL |
| | KTYRPDDLRTRRENRQLMQWSSAKVRKYLKEGCELYGLHFLEVPANYT |
| | SRQCSRTGLPGIRCDDVPTGDFLKAPWWRRAINTAREKNGGDAKDRFL |
| | VDLYDHLNNLQSKGEALPATVRVPRQGGNLFIAGAQLDDTNKERRAIQ |
| | ADLNAAANIGLRALLDPDWRGRWWYVPCKDGTSEPALDRIEGSTAFND |
| | VRSLPTGDNSSRRAPREIENLWRDPSGDSLESGTWSPTRAYWDTVQSRV |
| | IELLRRHAGLPTS (SEQ ID NO: 71) |
| LsCas12b | MSIRSFKLKLKTKSGVNAEQLRRGLWRTHQLINDGIAYYMNWLVLLRQ |
| Laceyella | EDLFIRNKETNEIEKRSKEEIQAVLLERVHKQQQRNQWSGEVDEQTLLQ |
| sacchari | ALRQLYEEIVPSVIGKSGNASLKARFFLGPLVDPNNKTTKDVSKSGPTPK |
| WP_132221894.1 | WKKMKDAGDPNWVQEYEKYMAERQTLVRLEEMGLIPLFPMYTDEVG |
| | DIHWLPQASGYTRTWDRDMFQQAIERLLSWESWNRRVRERRAQFEKKT |
| | HDFASRFSESDVQWMNKLREYEAQQEKSLEENAFAPNEPYALTKKALR |
| | GWERVYHSWMRLDSAASEEAYWQEVATCQTAMRGEFGDPAIYQFLAQ |
| | KENHDIWRGYPERVIDFAELNHLQRELRRAKEDATFTLPDSVDHPLWVR |
| | YEAPGGTNIHGYDLVQDTKRNLTLILDKFILPDENGSWHEVKKVPFSLA |
| | KSKQFHRQVWLQEEQKQKKREVVFYDYSTNLPHLGTLAGAKLQWDRN |
| | FLNKRTQQQIEETGEIGKVFFNISVDVRPAVEVKNGRLQNGLGKALTVL |
| | THPDGTKIVTGWKAEQLEKWVGESGRVSSLGLDSLSEGLRVMSIDLGQ |
| | RTSATVSVFEITKEAPDNPYKFFYQLEGTEMFAVHQRSFLLALPGENPPQ |
| | KIKQMREIRWKERNRIKQQVDQLSAILRLHKKVNEDERIQAIDKLLQKV |
| | ASWQLNEEIATAWNQALSQLYSKAKENDLQWNQAIKNAHHQLEPVVG |
| | KQISLWRKDLSTGRQGIAGLSLWSIEELEATKKLLTRWSKRSREPGVVK |
| | RIERFETFAKQIQHHINQVKENRLKQLANLIVMTALGYKYDQEQKKWIE |
| | VYPACQVVLFENLRSYRFSFERSRRENKKLMEWSHRSIPKLVQMQGELF |
| | GLQVADVYAAYSSRYHGRTGAPGIRCHALTEADLRNETNIIHELIEAGFI |
| | KEEHRPYLQQGDLVPWSGGELFATLQKPYDNPRILTLHADINAAQNIQK |
| | RFWHPSMWFRVNCESVMEGEIVTYVPKNKTVHKKQGKTFRFVKVEGS |
| | DVYEWAKWSKNRNKNTFSSITERKPPSSMILFRDPSGTFFKEQEWVEQK |
| | TFWGKVQSMIQAYMKKTIVQRMEE (SEQ ID NO: 72) |
| DtCas12b | MVLGRKDDTAELRRALWTTHEHVNLAVAEVERVLLRCRGRSYWTLDR |
| Dsulfonatronum | RGDPVHVPESQVAEDALAMAREAQRRNGWPVVGEDEEILLALRYLYEQ |
| thiodismutans | IVPSCLLDDLGKPLKGDAQKIGTNYAGPLFDSDTCRRDEGKDVACCGPF |
| WP_031386437 | HEVAGKYLGALPEWATPISKQEFDGKDASHLRFKATGGDDAFFRVSIEK |
| | ANAWYEDPANQDALKNKAYNKDDWKKEKDKGISSWAVKYIQKQLQL |
| | GQDPRTEVRRKLWLELGLLPLFIPVFDKTMVGNLWNRLAVRLALAHLL |
| | SWESWNHRAVQDQALARAKRDELAALFLGMEDGFAGLREYELRRNESI |
| | KQHAFEPVDRPYVVSGRALRSWTRVREEWLRHGDTQESRKNICNRLQD |
| | RLRGKFGDPDVFHWLAEDGQEALWKERDCVTSFSLLNDADGLLEKRK |
| | GYALMTFADARLHPRWAMYEAPGGSNLRTYQIRKTENGLWADVVLLS |
| | PRNESAAVEEKTFNVRLAPSGQLSNVSFDQIQKGSKMVGRCRYQSANQ |
| | QFEGLLGGAEILFDRKRIANEQHGATDLASKPGHVWFKLTLDVRPQAPQ |
| | GWLDGKGRPALPPEAKHFKTALSNKSKFADQVRPGLRVLSVDLGVRSF |
| | AACSVFELVRGGPDQGTYFPAADGRTVDDPEKLWAKHERSFKITLPGEN |
| | PSRKEEIARRAAMEELRSLNGDIRRLKAILRLSVLQEDDPRTEHLRLFME |
| | AIVDDPAKSALNAELFKGFGDDRFRSTPDLWKQHCHFFHDKAEKVVAE |
| | RFSRWRTETRPKSSSWQDWRERRGYAGGKSYWAVTYLEAVRGLILRW |
| | NMRGRTYGEVNRQDKKQFGTVASALLHHINQLKEDRIKTGADMIIQAA |
| | RGFVPRKNGAGWVQVHEPCRLILFEDLARYRFRTDRSRRENSRLMRWS |
| | HREIVNEVGMQGELYGLHVDTTEAGFSSRYLASSGAPGVRCRHLVEEDF |
| | HDGLPGMHLVGELDWLLPKDKDRTANEARRLLGGMVRPGMLVPWDG |
| | GELFATLNAASQLHVIHADINAAQNLQRRFWGRCGEAIRIVCNQLSVDG |
| | STRYEMAKAPKARLLGALQQLKNGDAPFHLTSIPNSQKPENSYVMTPTN |
| | AGKKYRAGPGEKSSGEEDELALDIVEQAEELAQGRKTFFRDPSGVFFAP |
| | DRWLPSEIYWSRIRRRIWQVTLERNSSGRQERAEMDEMPY (SEQ ID NO: |
| | 73) |

[0356] The prime editors described herein may also comprise Cas12a (Cpf1) (dCpf1) variants that may be used as a guide nucleotide sequence-programmable DNA-binding protein domain. The Cas12a (Cpf1) protein has a RuvC-like endonuclease domain that is similar to the RuvC domain of Cas9 but does not have a HNH endonuclease domain, and the N-terminal of Cas12a (Cpf1) does not have the alfa-helical recognition lobe of Cas9. It was shown in Zetsche et al., Cell, 163,759-771,2015 (which is incorporated herein by reference) that, the RuvC-like domain of Cas12a (Cpf1) is responsible for cleaving both DNA strands and inactivation of the RuvC-like domain inactivates Cas12a (Cpf1) nuclease activity.

[0357] In some embodiments, the napDNAbp is a single effector of a microbial CRISPR-Cas system. Single effectors of microbial CRISPR-Cas systems include, without limitation, Cas9, Cas12a (Cpf1), Cas12b1 (C2c1), Cas13a (C2c2), and Cas12c (C2c3). Typically, microbial CRISPR-Cas systems are divided into Class 1 and Class 2 systems. Class 1 systems have multisubunit effector complexes, while Class 2 systems have a single protein effector. For example, Cas9 and Cas12a (Cpf1) are Class 2 effectors. In addition to Cas9 and Cas12a (Cpf1), three distinct Class 2 CRISPR-Cas systems (Cas12b1, Cas13a, and Cas12c) have been described by Shmakov et al., “Discovery and Functional Characterization of Diverse Class 2 CRISPR Cas Systems”, Mol. Cell, 2015 Nov. 5; 60(3): 385-397, the entire contents of which are hereby incorporated by reference.

[0358] Effectors of two of the systems, Cas12b1 and Cas12c, contain RuvC-like endonuclease domains related to Cas12a. A third system, Cas13a contains an effector with two predicated HEPN RNase domains. Production of mature CRISPR RNA is tracrRNA-independent, unlike production of CRISPR RNA by Cas12b1. Cas depends on both CRISPR RNA and tracrRNA for DNA cleavage. Bacterial Cas13a has been shown to possess a unique RNase activity for CRISPR RNA maturation distinct from its RNA-activated single-stranded RNA degradation activity. These RNase functions are different from each other and from the CRISPR RNA-processing behavior of Cas12a. See, e.g., East-Seletsky, et al., “Two distinct RNase activities of CRISPR-Cas13a enable guide-RNA processing and RNA detection”, Nature, 2016 Oct. 13; 538(7624):270-273, the entire contents of which are hereby incorporated by reference. In vitro biochemical analysis of Cas13a in Leptotrichia shahii has shown that Cas13a is guided by a single CRISPR RNA and can be programed to cleave ssRNA targets carrying complementary protospacers. Catalytic residues in the two conserved HEPN domains mediate cleavage. Mutations in the catalytic residues generate catalytically inactive RNA-binding proteins. See e.g., Abudayyeh et al., “C2c2 is a single-component programmable RNA-guided RNA-targeting CRISPR effector”, Science, 2016 Aug. 5; 353(6299), the entire contents of which are hereby incorporated by reference.

[0359] The crystal structure of Alicyclobaccillus acidoterrastris Cas12b1 (AacC2c1) has been reported in complex with a chimeric single-molecule guide RNA (sgRNA). See e.g., Liu et al., “C2c1-sgRNA Complex Structure Reveals RNA-Guided DNA Cleavage Mechanism”, Mol. Cell, 2017 Jan. 19; 65(2):310-322, the entire contents of which are hereby incorporated by reference. The crystal structure has also been reported in Alicyclobacillus acidoterrestris C2c1 bound to target DNAs as ternary complexes. See e.g., Yang et al., “PAM-dependent Target DNA Recognition and Cleavage by C2C1 CRISPR-Cas endonuclease”, Cell, 2016 Dec. 15; 167(7):1814-1828, the entire contents of which are hereby incorporated by reference. Catalytically competent conformations of AacC2c1, both with target and non-target DNA strands, have been captured independently positioned within a single RuvC catalytic pocket, with C2c1-mediated cleavage resulting in a staggered seven-nucleotide break of target DNA. Structural comparisons between C2c1 ternary complexes and previously identified Cas9 and Cpf1 counterparts demonstrate the diversity of mechanisms used by CRISPR-Cas9 systems.

[0360] In some embodiments, the napDNAbp may be a C2c1, a C2c2, or a C2c3 protein. In some embodiments, the napDNAbp is a C2c1 protein. In some embodiments, the napDNAbp is a Cas13a protein. In some embodiments, the napDNAbp is a Cas12c protein. In some embodiments, the napDNAbp comprises an amino acid sequence that is at least 85%, at least 90%, at least 91%, at least 92%, at least 93%, at least 94%, at least 95%, at least 96%, at least 97%, at least 98%, at least 99%, or at least 99.5% identical to a naturally-occurring Cas12b1 (C2c1), Cas13a (C2c2), or Cas12c (C2c3) protein. In some embodiments, the napDNAbp is a naturally-occurring Cas12b1 (C2c1), Cas13a (C2c2), or Cas12c (C2c3) protein.

[0361] H. Cas9 Circular Permutants

[0362] In various embodiments, the prime editors disclosed herein may comprise a circular permutant of Cas9.

[0363] The term “circularly permuted Cas9” or “circular permutant” of Cas9 or “CP-Cas9”) refers to any Cas9 protein, or variant thereof, that occurs or has been modify to engineered as a circular permutant variant, which means the N-terminus and the C-terminus of a Cas9 protein (e.g., a wild type Cas9 protein) have been topically rearranged. Such circularly permuted Cas9 proteins, or variants thereof, retain the ability to bind DNA when complexed with a guide RNA (gRNA). See, Oakes et al., “Protein Engineering of Cas9 for enhanced function,” Methods Enzymol, 2014, 546: 491-511 and Oakes et al., “CRISPR-Cas9 Circular Permutants as Programmable Scaffolds for Genome Modification,” Cell, Jan. 10, 2019, 176: 254-267, each of are incorporated herein by reference. The instant disclosure contemplates any previously known CP-Cas9 or use a new CP-Cas9 so long as the resulting circularly permuted protein retains the ability to bind DNA when complexed with a guide RNA (gRNA).

[0364] Any of the Cas9 proteins described herein, including any variant, ortholog, or naturally occurring Cas9 or equivalent thereof, may be reconfigured as a circular permutant variant.

[0365] In various embodiments, the circular permutants of Cas9 may have the following structure: N-terminus-[original C-terminus]-[optional linker]-[original N-terminus]-C-terminus.

[0366] As an example, the present disclosure contemplates the following circular permutants of canonical S. pyogenes Cas9 (1368 amino acids of UniProtKB-Q99ZW2 (CAS9_STRP1) (numbering is based on the amino acid position in SEQ ID NO: 18)):

N-terminus-[1268-1368]-[optional linker]-[1-1267]-C-terminus;
N-terminus-[1168-1368]-[optional linker]-[1-1167]-C-terminus;
N-terminus-[1068-1368]-[optional linker]-[1-1067]-C-terminus;
N-terminus-[968-1368]-[optional linker]-[1-967]-C-terminus;
N-terminus-[868-1368]-[optional linker]-[1-867]-C-terminus;
N-terminus-[768-1368]-[optional linker]-[1-767]-C-terminus;
N-terminus-[668-1368]-[optional linker]-[1-667]-C-terminus;
N-terminus-[568-1368]-[optional linker]-[1-567]-C-terminus;
N-terminus-[468-1368]-[optional linker]-[1-467]-C-terminus;
N-terminus-[368-1368]-[optional linker]-[1-367]-C-terminus;
N-terminus-[268-1368]-[optional linker]-[1-267]-C-terminus;
N-terminus-[168-1368]-[optional linker]-[1-167]-C-terminus;
N-terminus-[68-1368]-[optional linker]-[1-67]-C-terminus; or
N-terminus-[10-1368]-[optional linker]-[1-9]-C-terminus, or the corresponding circular permutants of other Cas9 proteins (including other Cas9 orthologs, variants, etc).

[0367] In particular embodiments, the circular permuant Cas9 has the following structure (based on S. pyogenes Cas9 (1368 amino acids of UniProtKB-Q99ZW2 (CAS9_STRP1) (numbering is based on the amino acid position in SEQ ID NO: 18):

N-terminus-[102-1368]-[optional linker]-[1-101]-C-terminus;
N-terminus-[1028-1368]-[optional linker]-[1-1027]-C-terminus;
N-terminus-[1041-1368]-[optional linker]-[1-1043]-C-terminus;
N-terminus-[1249-1368]-[optional linker]-[1-1248]-C-terminus; or
N-terminus-[1300-1368]-[optional linker]-[1-1299]-C-terminus, or the corresponding circular permutants of other Cas9 proteins (including other Cas9 orthologs, variants, etc).

[0368] In still other embodiments, the circular permuant Cas9 has the following structure (based on S. pyogenes Cas9 (1368 amino acids of UniProtKB-Q99ZW2 (CAS9_STRP1) (numbering is based on the amino acid position in SEQ ID NO: 18):

N-terminus-[103-1368]-[optional linker]-[1-102]-C-terminus;
N-terminus-[1029-1368]-[optional linker]-[1-1028]-C-terminus;
N-terminus-[1042-1368]-[optional linker]-[1-1041]-C-terminus;
N-terminus-[1250-1368]-[optional linker]-[1-1249]-C-terminus; or
N-terminus-[1301-1368]-[optional linker]-[1-1300]-C-terminus, or the corresponding circular permutants of other Cas9 proteins (including other Cas9 orthologs, variants, etc).

[0369] In some embodiments, the circular permutant can be formed by linking a C-terminal fragment of a Cas9 to an N-terminal fragment of a Cas9, either directly or by using a linker, such as an amino acid linker. In some embodiments, The C-terminal fragment may correspond to the C-terminal 95% or more of the amino acids of a Cas9 (e.g., amino acids about 1300-1368), or the C-terminal 90%, 85%, 80%, 75%, 70%, 65%, 60%, 55%, 50%, 45%, 40%, 35%, 30%, 25%, 20%, 15%, 10%, or 5% or more of a Cas9 (e.g., any one of SEQ ID NOs: 77-86). The N-terminal portion may correspond to the N-terminal 95% or more of the amino acids of a Cas9 (e.g., amino acids about 1-1300), or the N-terminal 90%, 85%, 80%, 75%, 70%, 65%, 60%, 55%, 50%, 45%, 40%, 35%, 30%, 25%, 20%, 15%, 10%, or 5% or more of a Cas9 (e.g., of SEQ ID NO: 18).

[0370] In some embodiments, the circular permutant can be formed by linking a C-terminal fragment of a Cas9 to an N-terminal fragment of a Cas9, either directly or by using a linker, such as an amino acid linker. In some embodiments, the C-terminal fragment that is rearranged to the N-terminus, includes or corresponds to the C-terminal 30% or less of the amino acids of a Cas9 (e.g., amino acids 1012-1368 of SEQ ID NO: 18). In some embodiments, the C-terminal fragment that is rearranged to the N-terminus, includes or corresponds to the C-terminal 30%, 29%, 28%, 27%, 26%, 25%, 24%, 23%, 22%, 21%, 20%, 19%, 18%, 17%, 16%, 15%, 14%, 13%, 12%, 11%, 10%, 9%, 8%, 7%, 6%, 5%, 4%, 3%, 2%, or 1% of the amino acids of a Cas9 (e.g., the Cas9 of SEQ ID NO: 18). In some embodiments, the C-terminal fragment that is rearranged to the N-terminus, includes or corresponds to the C-terminal 410 residues or less of a Cas9 (e.g., the Cas9 of SEQ ID NO: 18). In some embodiments, the C-terminal portion that is rearranged to the N-terminus, includes or corresponds to the C-terminal 410, 400, 390, 380, 370, 360, 350, 340, 330, 320, 310, 300, 290, 280, 270, 260, 250, 240, 230, 220, 210, 200, 190, 180, 170, 160, 150, 140, 130, 120, 110, 100, 90, 80, 70, 60, 50, 40, 30, 20, or 10 residues of a Cas9 (e.g., the Cas9 of SEQ ID NO: 18). In some embodiments, the C-terminal portion that is rearranged to the N-terminus, includes or corresponds to the C-terminal 357, 341, 328, 120, or 69 residues of a Cas9 (e.g., the Cas9 of SEQ ID NO: 18).

[0371] In other embodiments, circular permutant Cas9 variants may be defined as a topological rearrangement of a Cas9 primary structure based on the following method, which is based on S. pyogenes Cas9 of SEQ ID NO: 18: (a) selecting a circular permutant (CP) site corresponding to an internal amino acid residue of the Cas9 primary structure, which dissects the original protein into two halves: an N-terminal region and a C-terminal region; (b) modifying the Cas9 protein sequence (e.g., by genetic engineering techniques) by moving the original C-terminal region (comprising the CP site amino acid) to preceed the original N-terminal region, thereby forming a new N-terminus of the Cas9 protein that now begins with the CP site amino acid residue. The CP site can be located in any domain of the Cas9 protein, including, for example, the helical-II domain, the RuvCIII domain, or the CTD domain. For example, the CP site may be located (relative the S. pyogenes Cas9 of SEQ ID NO: 18) at original amino acid residue 181, 199, 230, 270, 310, 1010, 1016, 1023, 1029, 1041, 1247, 1249, or 1282. Thus, once relocated to the N-terminus, original amino acid 181, 199, 230, 270, 310, 1010, 1016, 1023, 1029, 1041, 1247, 1249, or 1282 would become the new N-terminal amino acid. Nomenclature of these CP-Cas9 proteins may be referred to as Cas9-CP¹⁸¹, Cas9-CP¹⁹⁹, Cas9-CP²³⁰, Cas9-CP²⁷⁰, Cas9-CP³¹⁰, Cas9-CP¹⁰¹⁰, Cas9-CP¹⁰¹⁶, Cas9-CP¹⁰²³, Cas9-CP¹⁰²⁹, Cas9-CP¹⁰⁴¹, Cas9-CP¹²⁴⁷, Cas9-CP¹²⁴⁹, and Cas9-CP¹²⁸², respectively. This description is not meant to be limited to making CP variants from SEQ ID NO: 18, but may be implemented to make CP variants in any Cas9 sequence, either at CP sites that correspond to these positions, or at other CP sites entireley. This description is not meant to limit the specific CP sites in any way. Virtually any CP site may be used to form a CP-Cas9 variant.

[0372] Exemplary CP-Cas9 amino acid sequences, based on the Cas9 of SEQ ID NO: 18, are provided below in which linker sequences are indicated by underlining and optional methionine (M) residues are indicated in bold. It should be appreciated that the disclosure provides CP-Cas9 sequences that do not include a linker sequence or that include different linker sequences. It should be appreciated that CP-Cas9 sequences may be based on Cas9 sequences other than that of SEQ ID NO: 18 and any examples provided herein are not meant to be limiting. Exempalry CP-Cas9 sequences are as follows:

| CP name | Sequence | SEQ ID NO: |
|---|---|---|
| CP1012 | DYKVYDVRKMIAKSEQEIGKATAKYFFYSNIMNFFKTE | SEQ ID NO: 77 |
| | ITLANGEIRKRPLIETNGETGEIVWDKGRDFATVRKVLS | |
| | MPQVNIVKKTEVQTGGFSKESILPKRNSDKLIARKKDW | |
| | DPKKYGGFDSPTVAYSVLVVAKVEKGKSKKLKSVKEL | |
| | LGITIMERSSFEKNPIDFLEAKGYKEVKKDLIIKLPKYSL | |
| | FELENGRKRMLASAGELQKGNELALPSKYVNFLYLAS | |
| | HYEKLKGSPEDNEQKQLFVEQHKHYLDEIIEQISEFSKR | |
| | VILADANLDKVLSAYNKHRDKPIREQAENIIHLFTLTNL | |
| | GAPAAFKYFDTTIDRKRYTSTKEVLDATLIHQSITGLYE | |
| | TRIDLSQLGGDGGSGGSGGSGGSGGSGGSGGDKKYSIG | |
| | LAIGTNSVGWAVITDEYKVPSKKFKVLGNTDRHSIKKN | |
| | LIGALLFDSGETAEATRLKRTARRRYTRRKNRICYLQEI | |
| | FSNEMAKVDDSFFHRLEESFLVEEDKKHERHPIFGNIVD | |
| | EVAYHEKYPTIYHLRKKLVDSTDKADLRLIYLALAHMI | |
| | KFRGHFLIEGDLNPDNSDVDKLFIQLVQTYNQLFEENPI | |
| | NASGVDAKAILSARLSKSRRLENLIAQLPGEKKNGLFG | |
| | NLIALSLGLTPNFKSNFDLAEDAKLQLSKDTYDDDLDN | |
| | LLAQIGDQYADLFLAAKNLSDAILLSDILRVNTEITKAP | |
| | LSASMIKRYDEHHQDLTLLKALVRQQLPEKYKEIFFDQ | |
| | SKNGYAGYIDGGASQEEFYKFIKPILEKMDGTEELLVK | |
| | LNREDLLRKQRTFDNGSIPHQIHLGELHAILRRQEDFYP | |
| | FLKDNREKIEKILTFRIPYYVGPLARGNSRFAWMTRKSE | |
| | ETITPWNFEEVVDKGASAQSFIERMTNFDKNLPNEKVL | |
| | PKHSLLYEYFTVYNELTKVKYVTEGMRKPAFLSGEQK | |
| | KAIVDLLFKTNRKVTVKQLKEDYFKKIECFDSVETSGV | |
| | EDRFNASLGTYHDLLKIIKDKDFLDNEENEDILEDIVLT | |
| | LTLFEDREMIEERLKTYAHLFDDKVMKQLKRRRYTGW | |
| | GRLSRKLINGIRDKQSGKTILDFLKSDGFANRNFMQLIH | |
| | DDSLTFKEDIQKAQVSGQGDSLHEHIANLAGSPAIKKGI | |
| | LQTVKVVDELVKVMGRHKPENIVIEMARENQTTQKGQ | |
| | KNSRERMKRIEEGIKELGSQILKEHPVENTQLQNEKLYL | |
| | YYLQNGRDMYVDQELDINRLSDYDVDHIVPQSFLKDD | |
| | SIDNKVLTRSDKNRGKSDNVPSEEVVKKMKNYWRQLL | |
| | NAKLITQRKFDNLTKAERGGLSELDKAGFIKRQLVETR | |
| | QITKHVAQILDSRMNTKYDENDKLIREVKVITLKSKLVS | |
| | DFRKDFQFYKVREINNYHHAHDAYLNAVVGTALIKKY | |
| | PKLESEFVYG | |
| CP1028 | EIGKATAKYFFYSNIMNFFKTEITLANGEIRKRPLIETNG | SEQ ID NO: 78 |
| | ETGEIVWDKGRDFATVRKVLSMPQVNIVKKTEVQTGG | |
| | FSKESILPKRNSDKLIARKKDWDPKKYGGFDSPTVAYS | |
| | VLVVAKVEKGKSKKLKSVKELLGITIMERSSFEKNPIDF | |
| | LEAKGYKEVKKDLIIKLPKYSLFELENGRKRMLASAGE | |
| | LQKGNELALPSKYVNFLYLASHYEKLKGSPEDNEQKQ | |
| | LFVEQHKHYLDEIIEQISEFSKRVILADANLDKVLSAYN | |
| | KHRDKPIREQAENIIHLFTLTNLGAPAAFKYFDTTIDRK | |
| | RYTSTKEVLDATLIHQSITGLYETRIDLSQLGGDGGSGG | |
| | SGGSGGSGGSGGSGGMDKKYSIGLAIGTNSVGWAVIT | |
| | DEYKVPSKKFKVLGNTDRHSIKKNLIGALLFDSGETAE | |
| | ATRLKRTARRRYTRRKNRICYLQEIFSNEMAKVDDSFF | |
| | HRLEESFLVEEDKKHERHPIFGNIVDEVAYHEKYPTIYH | |
| | LRKKLVDSTDKADLRLIYLALAHMIKFRGHFLIEGDLN | |
| | PDNSDVDKLFIQLVQTYNQLFEENPINASGVDAKAILS | |
| | ARLSKSRRLENLIAQLPGEKKNGLFGNLIALSLGLTPNF | |
| | KSNFDLAEDAKLQLSKDTYDDDLDNLLAQIGDQYADL | |
| | FLAAKNLSDAILLSDILRVNTEITKAPLSASMIKRYDEH | |
| | HQDLTLLKALVRQQLPEKYKEIFFDQSKNGYAGYIDG | |
| | GASQEEFYKFIKPILEKMDGTEELLVKLNREDLLRKQR | |
| | TFDNGSIPHQIHLGELHAILRRQEDFYPFLKDNREKIEKI | |
| | LTFRIPYYVGPLARGNSRFAWMTRKSEETITPWNFEEV | |
| | VDKGASAQSFIERMTNFDKNLPNEKVLPKHSLLYEYFT | |
| | VYNELTKVKYVTEGMRKPAFLSGEQKKAIVDLLFKTN | |
| | RKVTVKQLKEDYFKKIECFDSVEISGVEDRFNASLGTY | |
| | HDLLKIIKDKDFLDNEENEDILEDIVLTLTLFEDREMIEE | |
| | RLKTYAHLFDDKVMKQLKRRRYTGWGRLSRKLINGIR | |
| | DKQSGKTILDFLKSDGFANRNFMQLIHDDSLTFKEDIQ | |
| | KAQVSGQGDSLHEHIANLAGSPAIKKGILQTVKVVDEL | |
| | VKVMGRHKPENIVIEMARENQTTQKGQKNSRERMKRI | |
| | EEGIKELGSQILKEHPVENTQLQNEKLYLYYLQNGRD | |
| | MYVDQELDINRLSDYDVDHIVPQSFLKDDSIDNKVLTR | |
| | SDKNRGKSDNVPSEEVVKKMKNYWRQLLNAKLITQR | |
| | KFDNLTKAERGGLSELDKAGFIKRQLVETRQITKHVAQ | |
| | ILDSRMNTKYDENDKLIREVKVITLKSKLVSDFRKDFQ | |
| | FYKVREINNYHHAHDAYLNAVVGTALIKKYPKLESEF | |
| | VYGDYKVYDVRKMIAKSEQ | |
| CP1041 | NIMNFFKTEITLANGEIRKRPLIETNGETGEIVWDKGRD | SEQ ID NO: 79 |
| | FATVRKVLSMPQVNIVKKTEVQTGGFSKESILPKRNSD | |
| | KLIARKKDWDPKKYGGFDSPTVAYSVLVVAKVEKGK | |
| | SKKLKSVKELLGITIMERSSFEKNPIDFLEAKGYKEVKK | |
| | DLIIKLPKYSLFELENGRKRMLASAGELQKGNELALPS | |
| | KYVNFLYLASHYEKLKGSPEDNEQKQLFVEQHKHYLD | |
| | EIIEQISEFSKRVILADANLDKVLSAYNKHRDKPIREQA | |
| | ENIIHLFTLTNLGAPAAFKYFDTTIDRKRYTSTKEVLDA | |
| | TLIHQSITGLYETRIDLSQLGGDGGSGGSGGSGGSGGSG | |
| | GSGGDKKYSIGLAIGTNSVGWAVITDEYKVPSKKFKVL | |
| | GNTDRHSIKKNLIGALLFDSGETAEATRLKRTARRRYT | |
| | RRKNRICYLQEIFSNEMAKVDDSFFHRLEESFLVEEDK | |
| | KHERHPIFGNIVDEVAYHEKYPTIYHLRKKLVDSTDKA | |
| | DLRLIYLALAHMIKFRGHFLIEGDLNPDNSDVDKLFIQL | |
| | VQTYNQLFEENPINASGVDAKAILSARLSKSRRLENLIA | |
| | QLPGEKKNGLFGNLIALSLGLTPNFKSNFDLAEDAKLQ | |
| | LSKDTYDDDLDNLLAQIGDQYADLFLAAKNLSDAILLS | |
| | DILRVNTEITKAPLSASMIKRYDEHHQDLTLLKALVRQ | |
| | QLPEKYKEIFFDQSKNGYAGYIDGGASQEEFYKFIKPIL | |
| | EKMDGTEELLVKLNREDLLRKQRTFDNGSIPHQIHLGE | |
| | LHAILRRQEDFYPFLKDNREKIEKILTFRIPYYVGPLAR | |
| | GNSRFAWMTRKSEETITPWNFEEVVDKGASAQSFIER | |
| | MTNFDKNLPNEKVLPKHSLLYEYFTVYNELTKVKYVT | |
| | EGMRKPAFLSGEQKKAIVDLLFKTNRKVTVKQLKEDY | |
| | FKKIECFDSVETSGVEDRFNASLGTYHDLLKIIKDKDFL | |
| | DNEENEDILEDIVLTLTLFEDREMIEERLKTYAHLFDDK | |
| | VMKQLKRRRYTGWGRLSRKLINGIRDKQSGKTILDFL | |
| | KSDGFANRNFMQLIHDDSLTFKEDIQKAQVSGQGDSL | |
| | HEHIANLAGSPAIKKGILQTVKVVDELVKVMGRHKPE | |
| | NIVIEMARENQTTQKGQKNSRERMKRIEEGIKELGSQIL | |
| | KEHPVENTQLQNEKLYLYYLQNGRDMYVDQELDINR | |
| | LSDYDVDHIVPQSFLKDDSIDNKVLTRSDKNRGKSDNV | |
| | PSEEVVKKMKNYWRQLLNAKLITQRKFDNLTKAERG | |
| | GLSELDKAGFIKRQLVETRQITKHVAQILDSRMNTKYD | |
| | ENDKLIREVKVITLKSKLVSDFRKDFQFYKVREINNYH | |
| | HAHDAYLNAVVGTALIKKYPKLESEFVYGDYKVYDV | |
| | RKMIAKSEQEIGKATAKYFFYS | |
| CP1249 | PEDNEQKQLFVEQHKHYLDEIIEQISEFSKRVILADANL | SEQ ID NO: 80 |
| | DKVLSAYNKHRDKPIREQAENIIHLFTLTNLGAPAAFK | |
| | YFDTTIDRKRYTSTKEVLDATLIHQSITGLYETRIDLSQL | |
| | GGDGGSGGSGGSGGSGGSGGSGGMDKKYSIGLAIGTN | |
| | SVGWAVITDEYKVPSKKFKVLGNTDRHSIKKNLIGALL | |
| | FDSGETAEATRLKRTARRRYTRRKNRICYLQEIFSNEM | |
| | AKVDDSFFHRLEESFLVEEDKKHERHPIFGNIVDEVAY | |
| | HEKYPTIYHLRKKLVDSTDKADLRLIYLALAHMIKFRG | |
| | HFLIEGDLNPDNSDVDKLFIQLVQTYNQLFEENPINASG | |
| | VDAKAILSARLSKSRRLENLIAQLPGEKKNGLFGNLIAL | |
| | SLGLTPNFKSNFDLAEDAKLQLSKDTYDDDLDNLLAQI | |
| | GDQYADLFLAAKNLSDAILLSDILRVNTEITKAPLSAS | |
| | MIKRYDEHHQDLTLLKALVRQQLPEKYKEIFFDQSKN | |
| | GYAGYIDGGASQEEFYKFIKPILEKMDGTEELLVKLNR | |
| | EDLLRKQRTFDNGSIPHQIHLGELHAILRRQEDFYPFLK | |
| | DNREKIEKILTFRIPYYVGPLARGNSRFAWMTRKSEETI | |
| | TPWNFEEVVDKGASAQSFIERMTNFDKNLPNEKVLPK | |
| | HSLLYEYFTVYNELTKVKYVTEGMRKPAFLSGEQKKA | |
| | IVDLLFKTNRKVTVKQLKEDYFKKIECFDSVETSGVED | |
| | RFNASLGTYHDLLKIIKDKDFLDNEENEDILEDIVLTLT | |
| | LFEDREMIEERLKTYAHLFDDKVMKQLKRRRYTGWG | |
| | RLSRKLINGIRDKQSGKTILDFLKSDGFANRNFMQLIHD | |
| | DSLTFKEDIQKAQVSGQGDSLHEHIANLAGSPAIKKGIL | |
| | QTVKVVDELVKVMGRHKPENIVIEMARENQTTQKGQ | |
| | KNSRERMKRIEEGIKELGSQILKEHPVENTQLQNEKLY | |
| | LYYLQNGRDMYVDQELDINRLSDYDVDHIVPQSFLKD | |
| | DSIDNKVLTRSDKNRGKSDNVPSEEVVKKMKNYWRQ | |
| | LLNAKLITQRKFDNLTKAERGGLSELDKAGFIKRQLVE | |
| | TRQITKHVAQILDSRMNTKYDENDKLIREVKVITLKSK | |
| | LVSDFRKDFQFYKVREINNYHHAHDAYLNAVVGTALI | |
| | KKYPKLESEFVYGDYKVYDVRKMIAKSEQEIGKATAK | |
| | YFFYSNIMNFFKTEITLANGEIRKRPLIETNGETGEIVW | |
| | DKGRDFATVRKVLSMPQVNIVKKTEVQTGGFSKESILP | |
| | KRNSDKLIARKKDWDPKKYGGFDSPTVAYSVLVVAK | |
| | VEKGKSKKLKSVKELLGITIMERSSFEKNPIDFLEAKGY | |
| | KEVKKDLIIKLPKYSLFELENGRKRMLASAGELQKGNE | |
| | LALPSKYVNFLYLASHYEKLKGS | |
| CP1300 | KPIREQAENIIHLFTLTNLGAPAAFKYFDTTIDRKRYTST | SEQ ID NO: 81 |
| | KEVLDATLIHQSITGLYETRIDLSQLGGDGGSGGSGGS | |
| | GGSGGSGGSGGDKKYSIGLAIGTNSVGWAVITDEYKV | |
| | PSKKFKVLGNTDRHSIKKNLIGALLFDSGETAEATRLK | |
| | RTARRRYTRRKNRICYLQEIFSNEMAKVDDSFFHRLEE | |
| | SFLVEEDKKHERHPIFGNIVDEVAYHEKYPTIYHLRKK | |
| | LVDSTDKADLRLIYLALAHMIKFRGHFLIEGDLNPDNS | |
| | DVDKLFIQLVQTYNQLFEENPINASGVDAKAILSARLS | |
| | KSRRLENLIAQLPGEKKNGLFGNLIALSLGLTPNFKSNF | |
| | DLAEDAKLQLSKDTYDDDLDNLLAQIGDQYADLFLAA | |
| | KNLSDAILLSDILRVNTEITKAPLSASMIKRYDEHHQDL | |
| | TLLKALVRQQLPEKYKEIFFDQSKNGYAGYIDGGASQE | |
| | EFYKFIKPILEKMDGTEELLVKLNREDLLRKQRTFDNG | |
| | SIPHQIHLGELHAILRRQEDFYPFLKDNREKIEKILTFRIP | |
| | YYVGPLARGNSRFAWMTRKSEETITPWNFEEVVDKGA | |
| | SAQSFIERMTNFDKNLPNEKVLPKHSLLYEYFTVYNEL | |
| | TKVKYVTEGMRKPAFLSGEQKKAIVDLLFKTNRKVTV | |
| | KQLKEDYFKKIECFDSVETSGVEDRFNASLGTYHDLLKI | |
| | IKDKDFLDNEENEDILEDIVLTLTLFEDREMIEERLKTY | |
| | AHLFDDKVMKQLKRRRYTGWGRLSRKLINGIRDKQSG | |
| | KTILDFLKSDGFANRNFMQLIHDDSLTFKEDIQKAQVS | |
| | GQGDSLHEHIANLAGSPAIKKGILQTVKVVDELVKVM | |
| | GRHKPENIVIEMARENQTTQKGQKNSRERMKRIEEGIK | |
| | ELGSQILKEHPVENTQLQNEKLYLYYLQNGRDMYVDQ | |
| | ELDINRLSDYDVDHIVPQSFLKDDSIDNKVLTRSDKNR | |
| | GKSDNVPSEEVVKKMKNYWRQLLNAKLITQRKFDNL | |
| | TKAERGGLSELDKAGFIKRQLVETRQITKHVAQILDSR | |
| | MNTKYDENDKLIREVKVITLKSKLVSDFRKDFQFYKV | |
| | REINNYHHAHDAYLNAVVGTALIKKYPKLESEFVYGD | |
| | YKVYDVRKMIAKSEQEIGKATAKYFFYSNIMNFFKTEI | |
| | TLANGEIRKRPLIETNGETGEIVWDKGRDFATVRKVLS | |
| | MPQVNIVKKTEVQTGGFSKESILPKRNSDKLIARKKDW | |
| | DPKKYGGFDSPTVAYSVLVVAKVEKGKSKKLKSVKEL | |
| | LGITIMERSSFEKNPIDFLEAKGYKEVKKDLIIKLPKYSL | |
| | FELENGRKRMLASAGELQKGNELALPSKYVNFLYLAS | |
| | HYEKLKGSPEDNEQKQLFVEQHKHYLDEIIEQISEFSKR | |
| | VILADANLDKVLSAYNKHRD | |

[0373] The Cas9 circular permutants that may be useful in the prime editing constructs described herein. Exemplary C-terminal fragments of Cas9, based on the Cas9 of SEQ ID NO: 18, which may be rearranged to an N-terminus of Cas9, are provided below. It should be appreciated that such C-terminal fragments of Cas9 are exemplary and are not meant to be limiting. These exemplary CP-Cas9 fragments have the following sequences:

| CP name | Sequence | SEQ ID NO: |
|---|---|---|
| CP1012 C- | DYKVYDVRKMIAKSEQEIGKATAKYFFYSNIEVINFFKT | SEQ ID NO: 82 |
| terminal | EITLANGEIRKRPLIETNGETGEIVWDKGRDFATVRKVL | |
| fragment | SMPQVNIVKKTEVQTGGFSKESILPKRNSDKLIARKKD | |
| | WDPKKYGGFDSPTVAYSVLVVAKVEKGKSKKLKSVK | |
| | ELLGITIMERSSFEKNPIDFLEAKGYKEVKKDLIIKLPKY | |
| | SLFELENGRKRMLASAGELQKGNELALPSKYVNFLYL | |
| | ASHYEKLKGSPEDNEQKQLFVEQHKHYLDEIIEQISEFS | |
| | KRVILADANLDKVLSAYNKHRDKPIREQAENIIHLFTLT | |
| | NLGAPAAFKYFDTTIDRKRYTSTKEVLDATLIHQSITGL | |
| | YETRIDLSQLGGD | |
| CP1028 C- | EIGKATAKYFFYSNIMNFFKTEITLANGEIRKRPLIETNG | SEQ ID NO: 83 |
| terminal | ETGEIVWDKGRDFATVRKVLSMPQVNIVKKTEVQTGG | |
| fragment | FSKESILPKRNSDKLIARKKDWDPKKYGGFDSPTVAYS | |
| | VLVVAKVEKGKSKKLKSVKELLGITIMERSSFEKNPIDF | |
| | LEAKGYKEVKKDLIIKLPKYSLFELENGRKRMLASAGE | |
| | LQKGNELALPSKYVNFLYLASHYEKLKGSPEDNEQKQ | |
| | LFVEQHKHYLDEIIEQISEFSKRVILADANLDKVLSAYN | |
| | KHRDKPIREQAENIIHLFTLTNLGAPAAFKYFDTTIDRK | |
| | RYTSTKEVLDATLIHQSITGLYETRIDLSQLGGD | |
| CP1041 C- | NIMNFFKTEITLANGEIRKRPLIETNGETGEIVWDKGRD | SEQ ID NO: 84 |
| terminal | FATVRKVLSMPQVNIVKKTEVQTGGFSKESILPKRNSD | |
| fragment | KLIARKKDWDPKKYGGFDSPTVAYSVLVVAKVEKGK | |
| | SKKLKSVKELLGITIMERSSFEKNPIDFLEAKGYKEVKK | |
| | DLIIKLPKYSLFELENGRKRMLASAGELQKGNELALPS | |
| | KYVNFLYLASHYEKLKGSPEDNEQKQLFVEQHKHYLD | |
| | EIIEQISEFSKRVILADANLDKVLSAYNKHRDKPIREQA | |
| | ENIIHLFTLTNLGAPAAFKYFDTTIDRKRYTSTKEVLDA | |
| | TLIHQSITGLYETRIDLSQLGGD | |
| CP1249 C- | PEDNEQKQLFVEQHKHYLDEIIEQISEFSKRVILADANL | SEQ ID NO: 85 |
| terminal | DKVLSAYNKHRDKPIREQAENIIHLFTLTNLGAPAAFK | |
| fragment | YFDTTIDRKRYTSTKEVLDATLIHQSITGLYETRIDLSQL | |
| | GGD | |
| CP1300 C- | KPIREQAENIIHLFTLTNLGAPAAFKYFDTTIDRKRYTST | SEQ ID NO: 86 |
| terminal | KEVLDATLIHQSITGLYETRIDLSQLGGD | |
| fragment | | |

[0374] I. Cas9 Variants with Modified PAM Specificities

[0375] The prime editors of the present disclosure may also comprise Cas9 variants with modified PAM specificities. Some aspects of this disclosure provide Cas9 proteins that exhibit activity on a target sequence that does not comprise the canonical PAM (5′-NGG-3′, where N is A, C, G, or T) at its 3′-end. In some embodiments, the Cas9 protein exhibits activity on a target sequence comprising a 5′-NGG-3′ PAM sequence at its 3′-end. In some embodiments, the Cas9 protein exhibits activity on a target sequence comprising a 5′-NNG-3′ PAM sequence at its 3′-end. In some embodiments, the Cas9 protein exhibits activity on a target sequence comprising a 5′-NNA-3′ PAM sequence at its 3′-end. In some embodiments, the Cas9 protein exhibits activity on a target sequence comprising a 5′-NNC-3′ PAM sequence at its 3′-end. In some embodiments, the Cas9 protein exhibits activity on a target sequence comprising a 5′-NNT-3′ PAM sequence at its 3′-end. In some embodiments, the Cas9 protein exhibits activity on a target sequence comprising a 5′-NGT-3′ PAM sequence at its 3′-end. In some embodiments, the Cas9 protein exhibits activity on a target sequence comprising a 5′-NGA-3′ PAM sequence at its 3′-end. In some embodiments, the Cas9 protein exhibits activity on a target sequence comprising a 5′-NGC-3′ PAM sequence at its 3′-end. In some embodiments, the Cas9 protein exhibits activity on a target sequence comprising a 5′-NAA-3′ PAM sequence at its 3′-end. In some embodiments, the Cas9 protein exhibits activity on a target sequence comprising a 5′-NAC-3′ PAM sequence at its 3′-end. In some embodiments, the Cas9 protein exhibits activity on a target sequence comprising a 5′-NAT-3′ PAM sequence at its 3′-end. In still other embodiments, the Cas9 protein exhibits activity on a target sequence comprising a 5′-NAG-3′ PAM sequence at its 3′-end.

[0376] It should be appreciated that any of the amino acid mutations described herein, (e.g., A262T) from a first amino acid residue (e.g., A) to a second amino acid residue (e.g., T) may also include mutations from the first amino acid residue to an amino acid residue that is similar to (e.g., conserved) the second amino acid residue. For example, mutation of an amino acid with a hydrophobic side chain (e.g., alanine, valine, isoleucine, leucine, methionine, phenylalanine, tyrosine, or tryptophan) may be a mutation to a second amino acid with a different hydrophobic side chain (e.g., alanine, valine, isoleucine, leucine, methionine, phenylalanine, tyrosine, or tryptophan). For example, a mutation of an alanine to a threonine (e.g., a A262T mutation) may also be a mutation from an alanine to an amino acid that is similar in size and chemical properties to a threonine, for example, serine. As another example, mutation of an amino acid with a positively charged side chain (e.g., arginine, histidine, or lysine) may be a mutation to a second amino acid with a different positively charged side chain (e.g., arginine, histidine, or lysine). As another example, mutation of an amino acid with a polar side chain (e.g., serine, threonine, asparagine, or glutamine) may be a mutation to a second amino acid with a different polar side chain (e.g., serine, threonine, asparagine, or glutamine). Additional similar amino acid pairs include, but are not limited to, the following: phenylalanine and tyrosine; asparagine and glutamine; methionine and cysteine; aspartic acid and glutamic acid; and arginine and lysine. The skilled artisan would recognize that such conservative amino acid substitutions will likely have minor effects on protein structure and are likely to be well tolerated without compromising function. In some embodiments, any amino of the amino acid mutations provided herein from one amino acid to a threonine may be an amino acid mutation to a serine. In some embodiments, any amino of the amino acid mutations provided herein from one amino acid to an arginine may be an amino acid mutation to a lysine. In some embodiments, any amino of the amino acid mutations provided herein from one amino acid to an isoleucine, may be an amino acid mutation to an alanine, valine, methionine, or leucine. In some embodiments, any amino of the amino acid mutations provided herein from one amino acid to a lysine may be an amino acid mutation to an arginine. In some embodiments, any amino of the amino acid mutations provided herein from one amino acid to an aspartic acid may be an amino acid mutation to a glutamic acid or asparagine. In some embodiments, any amino of the amino acid mutations provided herein from one amino acid to a valine may be an amino acid mutation to an alanine, isoleucine, methionine, or leucine. In some embodiments, any amino of the amino acid mutations provided herein from one amino acid to a glycine may be an amino acid mutation to an alanine. It should be appreciated, however, that additional conserved amino acid residues would be recognized by the skilled artisan and any of the amino acid mutations to other conserved amino acid residues are also within the scope of this disclosure.

[0377] In some embodiments, the Cas9 protein comprises a combination of mutations that exhibit activity on a target sequence comprising a 5′-NAA-3′ PAM sequence at its 3′-end. In some embodiments, the combination of mutations are present in any one of the clones listed in Table 1. In some embodiments, the combination of mutations are conservative mutations of the clones listed in Table 1. In some embodiments, the Cas9 protein comprises the combination of mutations of any one of the Cas9 clones listed in Table 1.

TABLE 1
NAA PAM Clones
Mutations from wild-type SpCas9 (e.g., SEQ ID NO: 18)

D177N, K218R, D614N, D1135N, P1137S, E1219V, A1320V, A1323D, R1333K
D177N, K218R, D614N, D1135N, E1219V, Q1221H, H1264Y, A1320V, R1333K
A10T, I322V, S409I, E427G, G715C, D1135N, E1219V, Q1221H, H1264Y, A1320V,
R1333K
A367T, K710E, R1114G, D1135N, P1137S, E1219V, Q1221H, H1264Y, A1320V, R1333K
A10T, I322V, S409I, E427G, R753G, D861N, D1135N, K1188R, E1219V, Q1221H,
H1264H, A1320V, R1333K
A10T, I322V, S409I, E427G, R654L, V743I, R753G, M1021T, D1135N, D1180G, K1211R,
E1219V, Q1221H, H1264Y, A1320V, R1333K
A10T, I322V, S409I, E427G, V743I, R753G, E762G, D1135N, D1180G, K1211R, E1219V,
Q1221H, H1264Y, A1320V, R1333K
A10T, I322V, S409I, E427G, R753G, D1135N, D1180G, K1211R, E1219V, Q1221H,
H1264Y, S1274R, A1320V, R1333K
A10T, I322V, S409I, E427G, A589S, R753G, D1135N, E1219V, Q1221H, H1264H,
A1320V, R1333K
A10T, I322V, S409I, E427G, R753G, E757K, G865G, D1135N, E1219V, Q1221H, H1264Y,
A1320V, R1333K
A10T, I322V, S409I, E427G, R654L, R753G, E757K, D1135N, E1219V, Q1221H, H1264Y,
A1320V, R1333K
A10T, I322V, S409I, E427G, K599R, M631A, R654L, K673E, V743I, R753G, N758H,
E762G, D1135N, D1180G, E1219V, Q1221H, Q1256R, H1264Y, A1320V, A1323D,
R1333K
A10T, I322V, S409I, E427G, R654L, K673E, V743I, R753G, E762G, N869S, N1054D,
R1114G, D1135N, D1180G, E1219V, Q1221H, H1264Y, A1320V, A1323D, R1333K
A10T, I322V, S409I, E427G, R654L, L727I, V743I, R753G, E762G, R859S, N946D,
F1134L, D1135N, D1180G, E1219V, Q1221H, H1264Y, N1317T, A1320V, A1323D,
R1333K
A10T, I322V, S409I, E427G, R654L, K673E, V743I, R753G, E762G, N803S, N869S,
Y1016D, G1077D, R1114G, F1134L, D1135N, D1180G, E1219V, Q1221H, H1264Y,
V1290G, L1318S, A1320V, A1323D, R1333K
A10T, I322V, S409I, E427G, R654L, K673E, V743I, R753G, E762G, N803S, N869S,
Y1016D, G1077D, R1114G, F1134L, D1135N, K1151E, D1180G, E1219V, Q1221H,
H1264Y, V1290G, E1318S, A1320V, R1333K
A10T, I322V, S409I, E427G, R654L, K673E, V743I, R753G, E762G, N803S, N869S,
Y1016D, G1077D, R1114G, F1134L, D1135N, D1180G, E1219V, Q1221H, H1264Y,
V1290G, L1318S, A1320V, A1323D, R1333K
A10T, I322V, S409I, E427G, R654L, K673E, F693L, V743I, R753G, E762G, N803S, N869S,
L921P, Y1016D, G1077D, F1080S, R1114G, D1135N, D1180G, E1219V, Q1221H, H1264Y,
L1318S, A1320V, A1323D, R1333K
A10T, I322V, S409I, E427G, E630K, R654L, K673E, V743I, R753G, E762G, Q768H,
N803S, N869S, Y1016D, G1077D, R1114G, F1134L, D1135N, D1180G, E1219V, Q1221H,
H1264Y, L1318S, A1320V, R1333K
A10T, I322V, S409I, E427G, R654L, K673E, F693L, V743I, R753G, E762G, Q768H,
N803S, N869S, Y1016D, G1077D, R1114G, F1134L, D1135N, D1180G, E1219V, Q1221H,
G1223S, H1264Y, L1318S, A1320V, R1333K
A10T, I322V, S409I, E427G, R654L, K673E, F693L, V743I, R753G, E762G, N803S, N869S,
L921P, Y1016D, G1077D, F1801S, R1114G, D1135N, D1180G, E1219V, Q1221H, H1264Y,
L1318S, A1320V, A1323D, R1333K
A10T, I322V, S409I, E427G, R654L, V743I, R753G, M1021T, D1135N, D1180G, K1211R,
E1219V, Q1221H, H1264Y, A1320V, R1333K
A10T, I322V, S409I, E427G, R654L, K673E, V743I, R753G, E762G, M673I, N803S, N869S,
G1077D, R1114G, D1135N, V1139A, D1180G, E1219V, Q1221H, A1320V, R1333K
A10T, I322V, S409I, E427G, R654L, K673E, V743I, R753G, E762G, N803S, N869S,
R1114G, D1135N, E1219V, Q1221H, A1320V, R1333K

[0378] In some embodiments, the Cas9 protein comprises an amino acid sequence that is at least 80% identical to the amino acid sequence of a Cas9 protein as provided by any one of the variants of Table 1. In some embodiments, the Cas9 protein comprises an amino acid sequence that is at least 85%, at least 90%, at least 92%, at least 95%, at least 96%, at least 97%, at least 98%, at least 99%, or at least 99.5% identical to the amino acid sequence of a Cas9 protein as provided by any one of the variants of Table 1.

[0379] In some embodiments, the Cas9 protein exhibits an increased activity on a target sequence that does not comprise the canonical PAM (5′-NGG-3) at its 3′ end as compared to Streptococcus pyogenes Cas9 as provided by SEQ ID NO: 18. In some embodiments, the Cas9 protein exhibits an activity on a target sequence having a 3′ end that is not directly adjacent to the canonical PAM sequence (5′-NGG-3′) that is at least 5-fold increased as compared to the activity of Streptococcus pyogenes Cas9 as provided by SEQ ID NO: 18 on the same target sequence. In some embodiments, the Cas9 protein exhibits an activity on a target sequence that is not directly adjacent to the canonical PAM sequence (5′-NGG-3′) that is at least 10-fold, at least 50-fold, at least 100-fold, at least 500-fold, at least 1,000-fold, at least 5,000-fold, at least 10,000-fold, at least 50,000-fold, at least 100,000-fold, at least 500,000-fold, or at least 1,000,000-fold increased as compared to the activity of Streptococcus pyogenes as provided by SEQ ID NO: 18 on the same target sequence. In some embodiments, the 3′ end of the target sequence is directly adjacent to an AAA, GAA, CAA, or TAA sequence. In some embodiments, the Cas9 protein comprises a combination of mutations that exhibit activity on a target sequence comprising a 5′-NAC-3′ PAM sequence at its 3′-end. In some embodiments, the combination of mutations are present in any one of the clones listed in Table 2. In some embodiments, the combination of mutations are conservative mutations of the clones listed in Table 2. In some embodiments, the Cas9 protein comprises the combination of mutations of any one of the Cas9 clones listed in Table 2.

TABLE 2
NAC PAM Clones
MUTATIONS FROM WILD-TYPE SPCAS9 (E.G., SEQ ID NO: 18)

T472I, R753G, K890E, D1332N, R1335Q, T1337N
I1057S, D1135N, P1301S, R1335Q, T1337N
T472I, R753G, D1332N, R1335Q, T1337N
D1135N, E1219V, D1332N, R1335Q, T1337N
T472I, R753G, K890E, D1332N, R1335Q, T1337N
I1057S, D1135N, P1301S, R1335Q, T1337N
T472I, R753G, D1332N, R1335Q, T1337N
T472I, R753G, Q771H, D1332N, R1335Q, T1337N
E627K, T638P, K652T, R753G, N803S, K959N, R1114G, D1135N, E1219V, D1332N,
R1335Q, T1337N
E627K, T638P, K652T, R753G, N803S, K959N, R1114G, D1135N, K1156E, E1219V,
D1332N, R1335Q, T1337N
E627K, T638P, V647I, R753G, N803S, K959N, G1030R, I1055E, R1114G, D1135N, E1219V,
D1332N, R1335Q, T1337N
E627K, E630G, T638P, V647A, G687R, N767D, N803S, K959N, R1114G, D1135N, E1219V,
D1332G, R1335Q, T1337N
E627K, T638P, R753G, N803S, K959N, R1114G, D1135N, E1219V, N1266H, D1332N,
R1335Q, T1337N
E627K, T638P, R753G, N803S, K959N, I1057T, R1114G, D1135N, E1219V, D1332N,
R1335Q, T1337N
E627K, T638P, R753G, N803S, K959N, R1114G, D1135N, E1219V, D1332N, R1335Q,
T1337N
E627K, M631I, T638P, R753G, N803S, K959N, Y1036H, R1114G, D1135N, E1219V,
D1251G, D1332G, R1335Q, T1337N
E627K, T638P, R753G, N803S, V875I, K959N, Y1016C, R1114G, D1135N, E1219V,
D1251G, D1332G, R1335Q, T1337N, I1348V
K608R, E627K, T638P, V647I, R654L, R753G, N803S, T804A, K848N, V922A, K959N,
R1114G, D1135N, E1219V, D1332N, R1335Q, T1337N
K608R, E627K, T638P, V647I, R753G, N803S, V922A, K959N, K1014N, V1015A, R1114G,
D1135N, K1156N, E1219V, N1252D, D1332N, R1335Q, T1337N
K608R, E627K, R629G, T638P, V647I, A711T, R753G, K775R, K789E, N803S, K959N,
V1015A, Y1036H, R1114G, D1135N, E1219V, N1286H, D1332N, R1335Q, T1337N
K608R, E627K, T638P, V647I, T740A, R753G, N803S, K948E, K959N, Y1016S, R1114G,
D1135N, E1219V, N1286H, D1332N, R1335Q, T1337N
K608R, E627K, T638P, V647I, T740A, N803S, K948E, K959N, Y1016S, R1114G, D1135N,
E1219V, N1286H, D1332N, R1335Q, T1337N
I670S, K608R, E627K, E630G, T638P, V647I, R653K, R753G, I795L, K797N, N803S,
K866R, K890N, K959N, Y1016C, R1114G, D1135N, E1219V, D1332N, R1335Q, T1337N
K608R, E627K, T638P, V647I, T740A, G752R, R753G, K797N, N803S, K948E, K959N,
V1015A, Y1016S, R1114G, D1135N, E1219V, N1266H, D1332N, R1335Q, T1337N
I570T, A589V, K608R, E627K, T638P, V647I, R654L, Q716R, R753G, N803S, K948E,
K959N, Y1016S, R1114G, D1135N, E1207G, E1219V, N1234D, D1332N, R1335Q, T1337N
K608R, E627K, R629G, T638P, V647I, R654L, Q740R, R753G, N803S, K959N, N990S,
T995S, V1015A, Y1036D, R1114G, D1135N, E1207G, E1219V, N1234D, N1266H, D1332N,
R1335Q, T1337N
I562F, V565D, I570T, K608R, L625S, E627K, T638P, V647I, R654I, G752R, R753G, N803S,
N808D, K959N, M1021L, R1114G, D1135N, N1177S, N1234D, D1332N, R1335Q, T1337N
I562F, I570T, K608R, E627K, T638P, V647I, R753G, E790A, N803S, K959N, V1015A,
Y1036H, R1114G, D1135N, D1180E, A1184T, E1219V, D1332N, R1335Q, T1337N
I570T, K608R, E627K, T638P, V647I, R654H, R753G, E790A, N803S, K959N, V1015A,
R1114G, D1127A, D1135N, E1219V, D1332N, R1335Q, T1337N
I570T, K608R, L625S, E627K, T638P, V647I, R654I, T703P, R753G, N803S, N808D, K959N,
M1021L, R1114G, D1135N, E1219V, D1332N, R1335Q, T1337N
I570S, K608R, E627K, E630G, T638P, V647I, R653K, R753G, I795L, N803S, K866R,
K890N, K959N, Y1016C, R1114G, D1135N, E1219V, D1332N, R1335Q, T1337N
I570T, K608R, E627K, T638P, V647I, R654H, R753G, E790A, N803S, K959N, V1016A,
R1114G, D1135N, E1219V, K1246E, D1332N, R1335Q, T1337N
K608R, E627K, T638P, V647I, R654L, K673E, R753G, E790A, N803S, K948E, K959N,
R1114G, D1127G, D1135N, D1180E, E1219V, N1286H, D1332N, R1335Q, T1337N
K608R, L625S, E627K, T638P, V647I, R654I, I670T, R753G, N803S, N808D, K959N,
M1021L, R1114G, D1135N, E1219V, N1286H, D1332N, R1335Q, T1337N
E627K, M631V, T638P, V647I, K710E, R753G, N803S, N808D, K948E, M1021L, R1114G,
D1135N, E1219V, D1332N, R1335Q, T1337N, S1338T, H1349R

[0380] In some embodiments, the Cas9 protein comprises an amino acid sequence that is at least 80% identical to the amino acid sequence of a Cas9 protein as provided by any one of the variants of Table 2. In some embodiments, the Cas9 protein comprises an amino acid sequence that is at least 85%, at least 90%, at least 92%, at least 95%, at least 96%, at least 97%, at least 98%, at least 99%, or at least 99.5% identical to the amino acid sequence of a Cas9 protein as provided by any one of the variants of Table 2.

[0381] In some embodiments, the Cas9 protein exhibits an increased activity on a target sequence that does not comprise the canonical PAM (5′-NGG-3′) at its 3′ end as compared to Streptococcus pyogenes Cas9 as provided by SEQ ID NO: 18. In some embodiments, the Cas9 protein exhibits an activity on a target sequence having a 3′ end that is not directly adjacent to the canonical PAM sequence (5′-NGG-3′) that is at least 5-fold increased as compared to the activity of Streptococcus pyogenes Cas9 as provided by SEQ ID NO: 18 on the same target sequence. In some embodiments, the Cas9 protein exhibits an activity on a target sequence that is not directly adjacent to the canonical PAM sequence (5′-NGG-3′) that is at least 10-fold, at least 50-fold, at least 100-fold, at least 500-fold, at least 1,000-fold, at least 5,000-fold, at least 10,000-fold, at least 50,000-fold, at least 100,000-fold, at least 500,000-fold, or at least 1,000,000-fold increased as compared to the activity of Streptococcus pyogenes as provided by SEQ ID NO: 18 on the same target sequence. In some embodiments, the 3′ end of the target sequence is directly adjacent to an AAC, GAC, CAC, or TAC sequence.

[0382] In some embodiments, the Cas9 protein comprises a combination of mutations that exhibit activity on a target sequence comprising a 5′-NAT-3′ PAM sequence at its 3′-end. In some embodiments, the combination of mutations are present in any one of the clones listed in Table 3. In some embodiments, the combination of mutations are conservative mutations of the clones listed in Table 3. In some embodiments, the Cas9 protein comprises the combination of mutations of any one of the Cas9 clones listed in Table 3.

TABLE 3
NAT PAM Clones
MUTATIONS FROM WILD-TYPE SPCAS9 (E.G., SEQ ID NO: 18)

K961E, H985Y, D1135N, K1191N, E1219V, Q1221H, A1320A, P1321S, R1335L
D1135N, G1218S, E1219V, Q1221H, P1249S, P1321S, D1322G, R1335L
V743I, R753G, E790A, D1135N, G1218S, E1219V, Q1221H, A1227V, P1249S, N1286K,
A1293T, P1321S, D1322G, R1335L, T1339I
F575S, M631L, R654L, V748I, V743I, R753G, D853E, V922A, R1114G D1135N, G1218S,
E1219V, Q1221H, A1227V, P1249S, N1286K, A1293T, P1321S, D1322G, R1335L, T1339I
F575S, M631L, R654L, R664K, R753G, D853E, V922A, R1114G D1135N, D1180G, G1218S,
E1219V, Q1221H, P1249S, N1286K, P1321S, D1322G, R1335L
M631L, R654L, R753G, K797E, D853E, V922A, D1012A, R1114G D1135N, G1218S,
E1219V, Q1221H, P1249S, N1317K, P1321S, D1322G, R1335L
F575S, M631L, R654L, R664K, R753G, D853E, V922A, R1114G, Y1131C, D1135N,
D1180G, G1218S, E1219V, Q1221H, P1249S, P1321S, D1322G, R1335L
F575S, M631L, R654L, R664K, R753G, D853E, V922A, R1114G, Y1131C, D1135N,
D1180G, G1218S, E1219V, Q1221H, P1249S, P1321S, D1322G, R1335L
F575S, D596Y, M631L, R654L, R664K, R753G, D853E, V922A, R1114G, Y1131C, D1135N,
D1180G, G1218S, E1219V, Q1221H, P1249S, Q1256R, P1321S, D1322G, R1335L
F575S, M631L, R654L, R664K, K710E, V750A, R753G, D853E, V922A, R1114G, Y1131C,
D1135N, D1180G, G1218S, E1219V, Q1221H, P1249S, P1321S, D1322G, R1335L
F575S, M631L, K649R, R654L, R664K, R753G, D853E, V922A, R1114G, Y1131C, D1135N,
K1156E, D1180G, G1218S, E1219V, Q1221H, P1249S, P1321S, D1322G, R1335L
F575S, M631L, R654L, R664K, R753G, D853E, V922A, R1114G, Y1131C, D1135N,
D1180G, G1218S, E1219V, Q1221H, P1249S, P1321S, D1322G, R1335L
F575S, M631L, R654L, R664K, R753G, D853E, V922A, I1057G, R1114G, Y1131C, D1135N,
D1180G, G1218S, E1219V, Q1221H, P1249S, N1308D, P1321S, D1322G, R1335L
M631L, R654L, R753G, D853E, V922A, R1114G, Y1131C, D1135N, E1150V, D1180G,
G1218S, E1219V, Q1221H, P1249S, P1321S, D1332G, R1335L
M631L, R654L, R664K, R753G, D853E, I1057V, Y1131C, D1135N, D1180G, G1218S,
E1219V, Q1221H, P1249S, P1321S, D1332G, R1335L
M631L, R654L, R664K, R753G, I1057V, R1114G, Y1131C, D1135N, D1180G, G1218S,
E1219V, Q1221H, P1249S, P1321S, D1332G, R1335L

[0383] The above description of various napDNAbps which can be used in connection with the presently disclose prime editors is not meant to be limiting in any way. The prime editors may comprise the canonical SpCas9, or any ortholog Cas9 protein, or any variant Cas9 protein—including any naturally occurring variant, mutant, or otherwise engineered version of Cas9—that is known or which can be made or evolved through a directed evolutionary or otherwise mutagenic process. In various embodiments, the Cas9 or Cas9 varants have a nickase activity, i.e., only cleave of strand of the target DNA sequence. In other embodiments, the Cas9 or Cas9 variants have inactive nucleases, i.e., are “dead” Cas9 proteins. Other variant Cas9 proteins that may be used are those having a smaller molecular weight than the canonical SpCas9 (e.g., for easier delivery) or having modified or rearranged primary amino acid structure (e.g., the circular permutant formats). The prime editors described herein may also comprise Cas9 equivalents, including Cas12a/Cpf1 and Cas12b proteins which are the result of convergent evolution. The napDNAbps used herein (e.g., SpCas9, Cas9 variant, or Cas9 equivalents) may also may also contain various modifications that alter/enhance their PAM specifities. Lastly, the application contemplates any Cas9, Cas9 variant, or Cas9 equivalent which has at least 70%, at least 75%, at least 80%, at least 85%, at least 90%, at least 91%, at least 92%, at least 93%, at least 94%, at least 95%, at least 96%, at least 97%, at least 98%, at least 99%, or at least 99.9% sequence identity to a reference Cas9 sequence, such as a references SpCas9 canonical sequences or a reference Cas9 equivalent (e.g., Cas12a/Cpf1).

[0384] In a particular embodiment, the Cas9 variant having expanded PAM capabilities is SpCas9 (H840A) VRQR (SEQ ID NO: 87), which has the following amino acid sequence (with the V, R, Q, R substitutions relative to the SpCas9 (H840A) of SEQ ID NO: 51 being show in bold underline. In addition, the methionine residue in SpCas9 (H840) was removed for SpCas9 (H840A) VRQR):

(SEQ ID NO: 87)
DKKYSIGLDIGTNSVGWAVITDEYKVPSKKFKVLGNTDRHSIKKNLIGA
LLFDSGETAEATRLKRTARRRYTRRKNRICYLQEIFSNEMAKVDDSFFH
RLEESFLVEEDKKHERHPIFGNIVDEVAYHEKYPTIYHLRKKLVDSTDK
ADLRLIYLALAHMIKFRGHFLIEGDLNPDNSDVDKLFIQLVQTYNQLFE
ENPINASGVDAKAILSARLSKSRRLENLIAQLPGEKKNGLFGNLIALSL
GLTPNFKSNFDLAEDAKLQLSKDTYDDDLDNLLAQIGDQYADLFLAAKN
LSDAILLSDILRVNTEITKAPLSASMIKRYDEHHQDLTLLKALVRQQLP
EKYKEIFFDQSKNGYAGYIDGGASQEEFYKFIKPILEKMDGTEELLVKL
NREDLLRKQRTFDNGSIPHQIHLGELHAILRRQEDFYPFLKDNREKIEK
ILTFRIPYYVGPLARGNSRFAWMTRKSEETITPWNFEEVVDKGASAQSF
IERMTNFDKNLPNEKVLPKHSLLYEYFTVYNELTKVKYVTEGMRKPAFL
SGEQKKAIVDLLFKTNRKVTVKQLKEDYFKKIECFDSVETSGVEDRFNA
SLGTYHDLLKIIKDKDFLDNEENEDILEDIVLTLTLFEDREMIEERLKT
YAHLFDDKVMKQLKRRRYTGWGRLSRKLINGIRDKQSGKTILDFLKSDG
FANRNFMQLIHDDSLTFKEDIQKAQVSGQGDSLHEHIANLAGSPAIKKG
ILQTVKVVDELVKVMGRHKPENIVIEMARENQTTQKGQKNSRERMKRIE
EGIKELGSQILKEHPVENTQLQNEKLYLYYLQNGRDMYVDQELDINRLS
DYDVDAIVPQSFLKDDSIDNKVLTRSDKNRGKSDNVPSEEVVKKMKNYW
RQLLNAKLITQRKFDNLTKAERGGLSELDKAGFIKRQLVETRQITKHVA
QILDSRMNTKYDENDKLIREVKVITLKSKLVSDFRKDFQFYKVREINNY
HHAHDAYLNAVVGTALIKKYPKLESEFVYGDYKVYDVRKMIAKSEQEIG
KATAKYFFYSNIMNFFKTEITLANGEIRKRPLIETNGETGEIVWDKGRD
FATVRKVLSMPQVNIVKKTEVQTGGFSKESILPKRNSDKLIARKKDWDP
KKYGGFVSPTVAYSVLVVAKVEKGKSKKLKSVKELLGITIMERSSFEKN
PIDFLEAKGYKEVKKDLIIKLPKYSLFELENGRKRMLASARELQKGNEL
ALPSKYVNFLYLASHYEKLKGSPEDNEQKQLFVEQHKHYLDEIIEQISE
FSKRVILADANLDKVLSAYNKHRDKPIREQAENIIHLFTLTNLGAPAAF
KYFDTTIDRKQYRSTKEVLDATLIHQSITGLYETRIDLSQLGGD

[0385] In another particular embodiment, the Cas9 variant having expanded PAM capabilities is SpCas9 (H840A) VRER, which has the following amino acid sequence (with the V, R, E, R substitutions relative to the SpCas9 (H840A) of SEQ ID NO: 51 being shown in bold underline. In addition, the methionine residue in SpCas9 (H840) was removed for SpCas9 (H840A) VRER):

(SEQ ID NO: 88)
DKKYSIGLDIGTNSVGWAVITDEYKVPSKKFKVLGNTDRHSIKKNLIGA
LLFDSGETAEATRLKRTARRRYTRRKNRICYLQEIFSNEMAKVDDSFFH
RLEESFLVEEDKKHERHPIFGNIVDEVAYHEKYPTIYHLRKKLVDSTDK
ADLRLIYLALAHMIKFRGHFLIEGDLNPDNSDVDKLFIQLVQTYNQLFE
ENPINASGVDAKAILSARLSKSRRLENLIAQLPGEKKNGLFGNLIALSL
GLTPNFKSNFDLAEDAKLQLSKDTYDDDLDNLLAQIGDQYADLFLAAKN
LSDAILLSDILRVNTEITKAPLSASMIKRYDEHHQDLTLLKALVRQQLP
EKYKEIFFDQSKNGYAGYIDGGASQEEFYKFIKPILEKMDGTEELLVKL
NREDLLRKQRTFDNGSIPHQIHLGELHAILRRQEDFYPFLKDNREKIEK
ILTFRIPYYVGPLARGNSRFAWMTRKSEETITPWNFEEVVDKGASAQSF
IERMTNFDKNLPNEKVLPKHSLLYEYFTVYNELTKVKYVTEGMRKPAFL
SGEQKKAIVDLLFKTNRKVTVKQLKEDYFKKIECFDSVEISGVEDRFNA
SLGTYHDLLKIIKDKDFLDNEENEDILEDIVLTLTLFEDREMIEERLKT
YAHLFDDKVMKQLKRRRYTGWGRLSRKLINGIRDKQSGKTILDFLKSDG
FANRNFMQLIHDDSLTFKEDIQKAQVSGQGDSLHEHIANLAGSPAIKKG
ILQTVKVVDELVKVMGRHKPENIVIEMARENQTTQKGQKNSRERMKRIE
EGIKELGSQILKEHPVENTQLQNEKLYLYYLQNGRDMYVDQELDINRLS
DYDVDAIVPQSFLKDDSIDNKVLTRSDKNRGKSDNVPSEEVVKKMKNYW
RQLLNAKLITQRKFDNLTKAERGGLSELDKAGFIKRQLVETRQITKHVA
QILDSRMNTKYDENDKLIREVKVITLKSKLVSDFRKDFQFYKVREINNY
HHAHDAYLNAVVGTALIKKYPKLESEFVYGDYKVYDVRKMIAKSEQEIG
KATAKYFFYSNIMNFFKTEITLANGEIRKRPLIETNGETGEIVWDKGRD
FATVRKVLSMPQVNIVKKTEVQTGGFSKESILPKRNSDKLIARKKDWDP
KKYGGFVSPTVAYSVLVVAKVEKGKSKKLKSVKELLGITIMERSSFEKN
PIDFLEAKGYKEVKKDLIIKLPKYSLFELENGRKRMLASARELQKGNEL
ALPSKYVNFLYLASHYEKLKGSPEDNEQKQLFVEQHKHYLDEIIEQISE
FSKRVILADANLDKVLSAYNKHRDKPIREQAENIIHLFTLTNLGAPAAF
KYFDTTIDRKEYRSTKEVLDATLIHQSITGLYETRIDLSQLGGD

[0386] In some embodiments, the napDNAbp that functions with a non-canonical PAM sequence is an Argonaute protein. One example of such a nucleic acid programmable DNA binding protein is an Argonaute protein from Natronobacterium gregoryi (NgAgo). NgAgo is a ssDNA-guided endonuclease. NgAgo binds 5′ phosphorylated ssDNA of ˜24 nucleotides (gDNA) to guide it to its target site and will make DNA double-strand breaks at the gDNA site. In contrast to Cas9, the NgAgo-gDNA system does not require a protospacer-adjacent motif (PAM). Using a nuclease inactive NgAgo (dNgAgo) can greatly expand the bases that may be targeted. The characterization and use of NgAgo have been described in Gao et al., Nat Biotechnol., 2016 Jul. 34(7):768-73. PubMed PMID: 27136078; Swarts et al., Nature. 507(7491) (2014):258-61; and Swarts et al., Nucleic Acids Res. 43(10) (2015):5120-9, each of which is incorporated herein by reference.

[0387] In some embodiments, the napDNAbp is a prokaryotic homolog of an Argonaute protein. Prokaryotic homologs of Argonaute proteins are known and have been described, for example, in Makarova K., et al., “Prokaryotic homologs of Argonaute proteins are predicted to function as key components of a novel system of defense against mobile genetic elements”, Biol Direct. 2009 Aug. 25; 4:29. doi: 10.1186/1745-6150-4-29, the entire contents of which is hereby incorporated by reference. In some embodiments, the napDNAbp is a Marinitoga piezophila Argunaute (MpAgo) protein. The CRISPR-associated Marinitoga piezophila Argunaute (MpAgo) protein cleaves single-stranded target sequences using 5′-phosphorylated guides. The 5′ guides are used by all known Argonautes. The crystal structure of an MpAgo-RNA complex shows a guide strand binding site comprising residues that block 5′ phosphate interactions. This data suggests the evolution of an Argonaute subclass with noncanonical specificity for a 5′-hydroxylated guide. See, e.g., Kaya et al., “A bacterial Argonaute with noncanonical guide RNA specificity”, Proc Natl Acad Sci USA. 2016 Apr. 12; 113(15):4057-62, the entire contents of which are hereby incorporated by reference). It should be appreciated that other argonaute proteins may be used, and are within the scope of this disclosure.

[0388] Some aspects of the disclosure provide Cas9 domains that have different PAM specificities. Typically, Cas9 proteins, such as Cas9 from S. pyogenes (spCas9), require a canonical NGG PAM sequence to bind a particular nucleic acid region. This may limit the ability to edit desired bases within a genome. In some embodiments, the base editing fusion proteins provided herein may need to be placed at a precise location, for example where a target base is placed within a 4 base region (e.g., a “editing window”), which is approximately 15 bases upstream of the PAM. See Komor, A. C., et al., “Programmable editing of a target base in genomic DNA without double-stranded DNA cleavage” Nature 533, 420-424 (2016), the entire contents of which are hereby incorporated by reference. Accordingly, in some embodiments, any of the fusion proteins provided herein may contain a Cas9 domain that is capable of binding a nucleotide sequence that does not contain a canonical (e.g., NGG) PAM sequence. Cas9 domains that bind to non-canonical PAM sequences have been described in the art and would be apparent to the skilled artisan. For example, Cas9 domains that bind non-canonical PAM sequences have been described in Kleinstiver, B. P., et al., “Engineered CRISPR-Cas9 nucleases with altered PAM specificities” Nature 523, 481-485 (2015); and Kleinstiver, B. P., et al., “Broadening the targeting range of Staphylococcus aureus CRISPR-Cas9 by modifying PAM recognition” Nature Biotechnology 33, 1293-1298 (2015); the entire contents of each are hereby incorporated by reference.

[0389] For example, a napDNAbp domain with altered PAM specificity, such as a domain with at least 80%, at least 85%, at least 90%, at least 95%, or at least 99% sequence identity with wild type Francisella novicida Cpf1 (D917, E1006, and D1255) (SEQ ID NO: 74), which has the following amino acid sequence:

(SEQ ID NO: 74)
MSIYQEFVNKYSLSKTLRFELIPQGKTLENIKARGLILDDEKRAKDYKK
AKQIIDKYHQFFIEEILSSVCISEDLLQNYSDVYFKLKKSDDDNLQKDF
KSAKDTIKKQISEYIKDSEKFKNLFNQNLIDAKKGQESDLILWLKQSKD
NGIELFKANSDITDIDEALEIIKSFKGWTTYFKGFHENRKNVYSSNDIP
TSIIYRIVDDNLPKFLENKAKYESLKDKAPEAINYEQIKKDLAEELTFD
IDYKTSEVNQRVFSLDEVFEIANFNNYLNQSGITKFNTIIGGKFVNGEN
TKRKGINEYINLYSQQINDKTLKKYKMSVLFKQILSDTESKSFVIDKLE
DDSDVVTTMQSFYEQIAAFKTVEEKSIKETLSLLFDDLKAQKLDLSKIY
FKNDKSLTDLSQQVFDDYSVIGTAVLEYITQQIAPKNLDNPSKKEQELI
AKKTEKAKYLSLETIKLALEEFNKHRDIDKQCRFEEILANFAAIPMIFD
EIAQNKDNLAQISIKYQNQGKKDLLQASAEDDVKAIKDLLDQTNNLLHK
LKIFHISQSEDKANILDKDEHFYLVFEECYFELANIVPLYNKIRNYITQ
KPYSDEKFKLNFENSTLANGWDKNKEPDNTAILFIKDDKYYLGVMNKKN
NKIFDDKAIKENKGEGYKKIVYKLLPGANKMLPKVFFSAKSIKFYNPSE
DILRIRNHSTHTKNGSPQKGYEKFEFNIEDCRKFIDFYKQSISKHPEWK
DFGFRFSDTQRYNSIDEFYREVENQGYKLTFENISESYIDSVVNQGKLY
LFQIYNKDFSAYSKGRPNLHTLYWKALFDERNLQDVVYKLNGEAELFYR
KQSIPKKITHPAKEAIANKNKDNPKKESVFEYDLIKDKRFTEDKFFFHC
PITINFKSSGANKFNDEINLLLKEKANDVHILSIDRGERHLAYYTLVDG
KGNIIKQDTFNIIGNDRMKTNYHDKLAAIEKDRDSARKDWKKINNIKEM
KEGYLSQVVHEIAKLVIEYNAIVVFEDLNFGFKRGRFKVEKQVYQKLEK
MLIEKLNYLVFKDNEFDKTGGVLRAYQLTAPFETFKKMGKQTGIIYYVP
AGFTSKICPVTGFVNQLYPKYESVSKSQEFFSKFDKICYNLDKGYFEFS
FDYKNFGDKAAKGKWTIASFGSRLINFRNSDKNHNWDTREVYPTKELEK
LLKDYSIEYGHGECIKAAICGESDKKFFAKLTSVLNTILQMRNSKTGTE
LDYLISPVADVNGNFFDSRQAPKNMPQDADANGAYHIGLKGLMLLGRIK
NNQEGKKLNLVIKNEEYFEFVQNRNN

[0390] An additional napDNAbp domain with altered PAM specificity, such as a domain having at least 80%, at least 85%, at least 90%, at least 95%, or at least 99% sequence identity with wild type Geobacillus thermodenitrificans Cas9 (SEQ ID NO: 75), which has the following amino acid sequence:

(SEQ ID NO: 75)
MKYKIGLDIGITSIGWAVINLDIPRIEDLGVRIFDRAENPKTGESLALP
RRLARSARRRLRRRKHRLERIRRLFVREGILTKEELNKLFEKKHEIDVW
QLRVEALDRKLNNDELARILLHLAKRRGFRSNRKSERTNKENSTMLKHI
EENQSILSSYRTVAEMVVKDPKFSLHKRNKEDNYTNTVARDDLEREIKL
IFAKQREYGNIVCTEAFEHEYISIWASQRPFASKDDIEKKVGFCTFEPK
EKRAPKATYTFQSFTVWEHINKLRLVSPGGIRALTDDERRLIYKQAFHK
NKITFHDVRTLLNLPDDTRFKGLLYDRNTTLKENEKVRFLELGAYHKIR
KAIDSVYGKGAAKSFRPIDFDTFGYALTMFKDDTDIRSYLRNEYEQNGK
RMENLADKVYDEELIEELLNLSFSKFGHLSLKALRNILPYMEQGEVYST
ACERAGYTFTGPKKKQKTVLLPNIPPIANPVVMRALTQARKVVNAIIKK
YGSPVSIHIELARELSQSFDERRKMQKEQEGNRKKNETAIRQLVEYGLT
LNPTGLDIVKFKLWSEQNGKCAYSLQPIEIERLLEPGYTEVDHVIPYSR
SLDDSYTNKVLVLTKENREKGNRTPAEYLGLGSERWQQFETFVLTNKQF
SKKKRDRLLRLHYDENEENEFKNRNLNDTRYISRFLANFIREHLKFADS
DDKQKVYTVNGRITAHLRSRWNFNKNREESNLHHAVDAAIVACTTPSDI
ARVTAFYQRREQNKELSKKTDPQFPQPWPHFADELQARLSKNPKESIKA
LNLGNYDNEKLESLQPVFVSRMPKRSITGAAHQETLRRYIGIDERSGKI
QTVVKKKLSEIQLDKTGHFPMYGKESDPRTYEAIRQRLLEHNNDPKKAF
QEPLYKPKKNGELGPIIRTIKIIDTTNQVIPLNDGKTVAYNSNIVRVDV
FEKDGKYYCVPIYTIDMMKGILPNKAIEPNKPYSEWKEMTEDYTFRFSL
YPNDLIRIEFPREKTIKTAVGEEIKIKDLFAYYQTIDSSNGGLSLVSHD
NNFSLRSIGSRTLKRFEKYQVDVLGNIYKVRGEKRVGVASSSHSKAGET
IRPL

[0391] In some embodiments, the nucleic acid programmable DNA binding protein (napDNAbp) is a nucleic acid programmable DNA binding protein that does not require a canonical (NGG) PAM sequence. In some embodiments, the napDNAbp is an argonaute protein. One example of such a nucleic acid programmable DNA binding protein is an Argonaute protein from Natronobacterium gregoryi (NgAgo). NgAgo is a ssDNA-guided endonuclease. NgAgo binds 5′ phosphorylated ssDNA of ˜24 nucleotides (gDNA) to guide it to its target site and will make DNA double-strand breaks at the gDNA site. In contrast to Cas9, the NgAgo-gDNA system does not require a protospacer-adjacent motif (PAM). Using a nuclease inactive NgAgo (dNgAgo) can greatly expand the bases that may be targeted. The characterization and use of NgAgo have been described in Gao et al., Nat Biotechnol., 34(7): 768-73 (2016), PubMed PMID: 27136078; Swarts et al., Nature, 507(7491): 258-61 (2014); and Swarts et al., Nucleic Acids Res. 43(10) (2015): 5120-9, each of which is incorporated herein by reference. The sequence of Natronobacterium gregoryi Argonaute is provided in SEQ ID NO: 76.

[0392] The disclosed fusion proteins may comprise a napDNAbp domain having at least 80%, at least 85%, at least 90%, at least 95%, or at least 99% sequence identity with wild type Natronobacterium gregoryi Argonaute (SEQ ID NO: 76), which has the following amino acid sequence:

(SEQ ID NO: 76)
MTVIDLDSTTTADELTSGHTYDISVTLTGVYDNTDEQHPRMSLAFEQDN
GERRYITLWKNTTPKDVFTYDYATGSTYIFTNIDYEVKDGYENLTATYQ
TTVENATAQEVGTTDEDETFAGGEPLDHHLDDALNETPDDAETESDSGH
VMTSFASRDQLPEWTLHTYTLTATDGAKTDTEYARRTLAYTVRQELYTD
HDAAPVATDGLMLLTPEPLGETPLDLDCGVRVEADETRTLDYTTAKDRL
LARELVEEGLKRSLWDDYLVRGIDEVLSKEPVLTCDEFDLHERYDLSVE
VGHSGRAYLHINFRHRFVPKLTLADIDDDNIYPGLRVKTTYRPRRGHIV
WGLRDECATDSLNTLGNQSVVAYHRNNQTPINTDLLDAIEAADRRVVET
RRQGHGDDAVSFPQELLAVEPNTHQIKQFASDGFHQQARSKTRLSASRC
SEKAQAFAERLDPVRLNGSTVEFSSEFFTGNNEQQLRLLYENGESVLTF
RDGARGAHPDETFSKGIVNPPESFEVAVVLPEQQADTCKAQWDTMADLL
NQAGAPPTRSETVQYDAFSSPESISLNVAGAIDPSEVDAAFVVLPPDQE
GFADLASPTETYDELKKALANMGIYSQMAYFDRFRDAKIFYTRNVALGL
LAAAGGVAFTTEHAMPGDADMFIGIDVSRSYPEDGASGQINIAATATAV
YKDGTILGHSSTRPQLGEKLQSTDVRDIMKNAILGYQQVTGESPTHIVI
HRDGFMNEDLDPATEFLNEQGVEYDIVEIRKQPQTRLLAVSDVQYDTPV
KSIAAINQNEPRATVATFGAPEYLATRDGGGLPRPIQIERVAGETDIET
LTRQVYLLSQSHIQVHNSTARLPITTAYADQASTHATKGYLVQTGAFES
NVGFL

[0393] In addition, any available methods may be utilized to obtain or construct a variant or mutant Cas9 protein. The term “mutation,” as used herein, refers to a substitution of a residue within a sequence, e.g., a nucleic acid or amino acid sequence, with another residue, or a deletion or insertion of one or more residues within a sequence. Mutations are typically described herein by identifying the original residue followed by the position of the residue within the sequence and by the identity of the newly substituted residue. Various methods for making the amino acid substitutions (mutations) provided herein are well known in the art, and are provided by, for example, Green and Sambrook, Molecular Cloning: A Laboratory Manual (4th ed., Cold Spring Harbor Laboratory Press, Cold Spring Harbor, N.Y. (2012)). Mutations can include a variety of categories, such as single base polymorphisms, microduplication regions, indel, and inversions, and is not meant to be limiting in any way. Mutations can include “loss-of-function” mutations which is the normal result of a mutation that reduces or abolishes a protein activity. Most loss-of-function mutations are recessive, because in a heterozygote the second chromosome copy carries an unmutated version of the gene coding for a fully functional protein whose presence compensates for the effect of the mutation. Mutations also embrace “gain-of-function” mutations, which is one which confers an abnormal activity on a protein or cell that is otherwise not present in a normal condition. Many gain-of-function mutations are in regulatory sequences rather than in coding regions, and can therefore have a number of consequences. For example, a mutation might lead to one or more genes being expressed in the wrong tissues, these tissues gaining functions that they normally lack. Because of their nature, gain-of-function mutations are usually dominant.

[0394] Mutations can be introduced into a reference Cas9 protein using site-directed mutagenesis. Older methods of site-directed mutagenesis known in the art rely on sub-cloning of the sequence to be mutated into a vector, such as an M13 bacteriophage vector, that allows the isolation of single-stranded DNA template. In these methods, one anneals a mutagenic primer (i.e., a primer capable of annealing to the site to be mutated but bearing one or more mismatched nucleotides at the site to be mutated) to the single-stranded template and then polymerizes the complement of the template starting from the 3′ end of the mutagenic primer. The resulting duplexes are then transformed into host bacteria and plaques are screened for the desired mutation. More recently, site-directed mutagenesis has employed PCR methodologies, which have the advantage of not requiring a single-stranded template. In addition, methods have been developed that do not require sub-cloning. Several issues must be considered when PCR-based site-directed mutagenesis is performed. First, in these methods it is desirable to reduce the number of PCR cycles to prevent expansion of undesired mutations introduced by the polymerase. Second, a selection must be employed in order to reduce the number of non-mutated parental molecules persisting in the reaction. Third, an extended-length PCR method is preferred in order to allow the use of a single PCR primer set. And fourth, because of the non-template-dependent terminal extension activity of some thermostable polymerases it is often necessary to incorporate an end-polishing step into the procedure prior to blunt-end ligation of the PCR-generated mutant product.

[0395] Mutations may also be introduced by directed evolution processes, such as phage-assisted continuous evolution (PACE) or phage-assisted noncontinuous evolution (PANCE). The term “phage-assisted continuous evolution (PACE),” as used herein, refers to continuous evolution that employs phage as viral vectors. The general concept of PACE technology has been described, for example, in International PCT Application, PCT/US2009/056194, filed Sep. 8, 2009, published as WO 2010/028347 on Mar. 11, 2010; International PCT Application, PCT/US2011/066747, filed Dec. 22, 2011, published as WO 2012/088381 on Jun. 28, 2012; U.S. Application, U.S. Pat. No. 9,023,594, issued May 5, 2015, International PCT Application, PCT/US2015/012022, filed Jan. 20, 2015, published as WO 2015/134121 on Sep. 11, 2015, and International PCT Application, PCT/US2016/027795, filed Apr. 15, 2016, published as WO 2016/168631 on Oct. 20, 2016, the entire contents of each of which are incorporated herein by reference. Variant Cas9s may also be obtain by phage-assisted non-continuous evolution (PANCE),” which as used herein, refers to non-continuous evolution that employs phage as viral vectors. PANCE is a simplified technique for rapid in vivo directed evolution using serial flask transfers of evolving ‘selection phage’ (SP), which contain a gene of interest to be evolved, across fresh E. coli host cells, thereby allowing genes inside the host E. coli to be held constant while genes contained in the SP continuously evolve. Serial flask transfers have long served as a widely-accessible approach for laboratory evolution of microbes, and, more recently, analogous approaches have been developed for bacteriophage evolution. The PANCE system features lower stringency than the PACE system.

[0396] Any of the references noted above which relate to Cas9 or Cas9 equivalents are hereby incorporated by reference in their entireties, if not already stated so.

[0397] J. Divided napDNAbp Domains for Split PE Delivery

[0398] In various embodiments, the prime editors described herein may be delivered to cells as two or more fragments which become assembled inside the cell (either by passive assembly, or by active assembly, such as using split intein sequences) into a reconstituted prime editor. In some cases, the self assembly may be passive whereby the two or more prime editor fragments associate inside the cell covalently or non-covalently to reconstitute the prime editor. In other cases, the self-assembly may be catalzyed by dimerization domains installed on each of the fragments. Examples of dimerization domains are described herein. In still other cases, the self-assembly may be catalyzed by split intein sequences installed on each of the prime editor fragments.

[0399] Split PE delivery may be advantageous to address various size constraints of different delivery approaches. For example, delivery approaches may include virus-based delivery methods, messenger RNA-based delivery methods, or RNP-based delivery (ribonucleoprotein-based delivery). And, each of these methods of delivery may be more efficient and/or effective by dividing up the prime editor into smaller pieces. Once inside the cell, the smaller pieces can assemble into a functional prime editor. Depending on the means of splitting, the divided prime editor fragments can be reassembled in a non-covalent manner or a covalent manner to reform the prime editor. In one embodiment, the prime editor can be split at one or more split sites into two or more fragments. The fragments can be unmodified (other than being split). Once the fragments are delivered to the cell (e.g., by direct delivery of a ribonucleoprotein complex or by nucleic delivery—e.g., mRNA delivery or virus vector based delivery), the fragments can reassociate covalently or non-covalently to reconstitute the prime editor. In another embodiment, the prime editor can be split at one or more split sites into two or more fragments. Each of the fragments can be modified to comprise a dimerization domain, whereby each fragment that is formed is coupled to a dimerization domain. Once delivered or expressed within a cell, the dimerization domains of the different fragments associate and bind to one another, bringing the different prime editor fragments together to reform a functional prime editor. In yet another embodiment, the prime editor fragment may be modified to comprise a split intein. Once delivered or expressed within a cell, the split intein domains of the different fragments associate and bind to one another, and then undergo trans-splicing, which results in the excision of the split-intein domains from each of the fragments, and a concomitant formation of a peptide bond between the fragments, thereby restoring the prime editor.

[0400] In one embodiment, the prime editor can be delivered using a split-intein approach.

[0401] The location of the split site can be positioned between any one or more pair of residues in the prime editor and in any domains therein, including within the napDNAbp domain, the polymerase domain (e.g., RT domain), linker domain that joins the napDNAbp domain and the polymerase domain.

[0402] In one embodiment, depicted in FIG. 66, the prime editor (PE) is divided at a split site within the napDNAbp.

[0403] In certain embodiments, the napDNAbp is a canonical SpCas9 polypeptide of SEQ ID NO: 18, as follows:

SpCas9 Streptococcus pyogenes M1 SwissProt
Accession No. Q99ZW2 Wild type 1368 AA
SEQ ID NO: 18
MDKKYSIGLDIGTNSVGWAVITDEYKVPSKKFKVLGNTDRHSIKKNLIGA
LLFDSGETAEATRLKRTARRRYTRRKNRICYLQEIFSNEMAKVDDSFFHR
LEESFLVEEDKKHERHPIFGNIVDEVAYHEKYPTIYHLRKKLVDSTDKAD
LRLIYLALAHMIKFRGHFLIEGDLNPDNSDVDKLFIQLVQTYNQLFEENP
INASGVDAKAILSARLSKSRRLENLIAQLPGEKKNGLFGNLIALSLGLTP
NFKSNFDLAEDAKLQLSKDTYDDDLDNLLAQIGDQYADLFLAAKNLSDAI
LLSDILRVNTEITKAPLSASMIKRYDEHHQDLTLLKALVRQQLPEKYKEI
FFDQSKNGYAGYIDGGASQEEFYKFIKPILEKMDGTEELLVKLNREDLLR
KQRTFDNGSIPHQIHLGELHAILRRQEDFYPFLKDNREKIEKILTFRIPY
YVGPLARGNSRFAWMTRKSEETITPWNFEEVVDKGASAQSFIERMTNFDK
NLPNEKVLPKHSLLYEYFTVYNELTKVKYVTEGMRKPAFLSGEQKKAIVD
LLFKTNRKVTVKQLKEDYFKKIECFDSVETSGVEDRFNASLGTYHDLLKI
IKDKDFLDNEENEDILEDIVLTLTLFEDREMIEERLKTYAHLFDDKVMKQ
LKRRRYTGWGRLSRKLINGIRDKQSGKTILDFLKSDGFANRNFMQLIHDD
SLTFKEDIQKAQVSGQGDSLHEHIANLAGSPAIKKGILQTVKVVDELVKV
MGRHKPENIVIEMARENQTTQKGQKNSRERMKRIEEGIKELGSQILKEHP
VENTQLQNEKLYLYYLQNGRDMYVDQELDINRLSDYDVDHIVPQSFLKDD
SIDNKVLTRSDKNRGKSDNVPSEEVVKKMKNYWRQLLNAKLITQRKFDNL
TKAERGGLSELDKAGFIKRQLVETRQITKHVAQILDSRMNTKYDENDKLI
REVKVITLKSKLVSDFRKDFQFYKVREINNYHHAHDAYLNAVVGTALIKK
YPKLESEFVYGDYKVYDVRKMIAKSEQEIGKATAKYFFYSNIMNFFKTEI
TLANGEIRKRPLIETNGETGEIVWDKGRDFATVRKVLSMPQVNIVKKTEV
QTGGFSKESILPKRNSDKLIARKKDWDPKKYGGFDSPTVAYSVLVVAKVE
KGKSKKLKSVKELLGITIMERSSFEKNPIDFLEAKGYKEVKKDLIIKLPK
YSLFELENGRKRMLASAGELQKGNELALPSKYVNFLYLASHYEKLKGSPE
DNEQKQLFVEQHKHYLDEIIEQISEFSKRVILADANLDKVLSAYNKHRDK
PIREQAENIIHLFTLTNLGAPAAFKYFDTTIDRKRYTSTKEVLDATLIHQ
SITGLYETRIDLSQLGGD

[0404] In certain embodiments, the SpCas9 is split into two fragments at a split site located between residues 1 and 2, or 2 and 3, or 3 and 4, or 4 and 5, or 5 and 6, or 6 and 7, or 7 and 8, or 8 and 9, or 9 and 10, or between any two pair of residues located anywhere between residues 1-10, 10-20, 20-30, 30-40, 40-50, 50-60, 60-70, 70-80, 80-90, 90-100, 100-200, 200-300, 300-400, 400-500, 500-600, 600-700, 700-800, 800-900, 1000-1100, 1100-1200, 1200-1300, or 1300-1368 of canonical SpCas9 of SEQ ID NO: 18.

[0405] In certain embodiments, a napDNAbp is split into two fragments at a split site that is located at a pair of residue that corresponds to any two pair of residues located anywhere between positions 1-10, 10-20, 20-30, 30-40, 40-50, 50-60, 60-70, 70-80, 80-90, 90-100, 100-200, 200-300, 300-400, 400-500, 500-600, 600-700, 700-800, 800-900, 1000-1100, 1100-1200, 1200-1300, or 1300-1368 of canonical SpCas9 of SEQ ID NO: 18.

[0406] In certain embodiments, the SpCas9 is split into two fragments at a split site located between residues 1 and 2, or 2 and 3, or 3 and 4, or 4 and 5, or 5 and 6, or 6 and 7, or 7 and 8, or 8 and 9, or 9 and 10, or between any two pair of residues located anywhere between residues 1-10, 10-20, 20-30, 30-40, 40-50, 50-60, 60-70, 70-80, 80-90, 90-100, 100-200, 200-300, 300-400, 400-500, 500-600, 600-700, 700-800, 800-900, 1000-1100, 1100-1200, 1200-1300, or 1300-1368 of canonical SpCas9 of SEQ ID NO: 18. In certain embodiments, the split site is located one or more polypeptide bond sites (i.e., a “split site or split-intein split site”), fused to a split intein, and then delivered to cells as separately-encoded fusion proteins. Once the split-intein fusion proteins (i.e., protein halves) are expressed within a cell, the proteins undergo trans-splicing to form a complete or whole PE with the concomitant removal of the joined split-intein sequences.

[0407] For example, as shown in FIG. 66, the N-terminal extein can be fused to a first split-intein (e.g., N intein) and the C-terminal extein can be fused to a second split-intein (e.g., C intein). The N-terminal extein becomes fused to the C-terminal extein to reform a whole prime editor fusion protein comprising an napDNAbp domain and a polymerase domain (e.g., RT domain) upon the self-association of the N intein and the C intein inside the cell, followed by their self-excision, and the concomitant formation of a peptide bond between the N-terminal extein and C-terminal extein portions of a whole prime editor (PE).

[0408] To take advantage of a split-PE delivery strategy using split-inteins, the prime editor needs to be divided at one or more split sites to create at least two separate halves of a prime editor, each of which may be rejoined inside a cell if each half is fused to a split-intein sequence.

[0409] In certain embodiments, the prime editor is split at a single split site. In certain other embodiments, the prime editor is split at two split sites, or three split sites, or four split sites, or more.

[0410] In a preferred embodiment, the prime editor is split at a single split site to create two separate halves of a prime editor, each of which can be fused to a split intein sequence

[0411] An exemplary split intein is the Ssp DnaE intein, which comprises two subunits, namely, DnaE-N and DnaE-C. The two different subunits are encoded by separate genes, namely dnaE-n and dnaE-c, which encode the DnaE-N and DnaE-C subunits, respectively. DnaE is a naturally occurring split intein in Synechocytis sp. PCC6803 and is capable of directing trans-splicing of two separate proteins, each comprising a fusion with either DnaE-N or DnaE-C.

[0412] Additional naturally occurring or engineered split-intein sequences are known in the or can be made from whole-intein sequences described herein or those available in the art. Examples of split-intein sequences can be found in Stevens et al., “A promiscuous split intein with expanded protein engineering applications,” PNAS, 2017, Vol. 114: 8538-8543; Iwai et al., “Highly efficient protein trans-splicing by a naturally split DnaE intein from Nostc punctiforme, FEBS Lett, 580: 1853-1858, each of which are incorporated herein by reference. Additional split intein sequences can be found, for example, in WO 2013/045632, WO 2014/055782, WO 2016/069774, and EP2877490, the contents each of which are incorporated herein by reference.

[0413] In addition, protein splicing in trans has been described in vivo and in vitro (Shingledecker, et al., Gene 207:187 (1998), Southworth, et al., EMBO J. 17:918 (1998); Mills, et al., Proc. Natl. Acad. Sci. USA, 95:3543-3548 (1998); Lew, et al., J. Biol. Chem., 273:15887-15890 (1998); Wu, et al., Biochim. Biophys. Acta 35732:1 (1998b), Yamazaki, et al., J. Am. Chem. Soc. 120:5591 (1998), Evans, et al., J. Biol. Chem. 275:9091 (2000); Otomo, et al., Biochemistry 38:16040-16044 (1999); Otomo, et al., J. Biolmol. NMR 14:105-114 (1999); Scott, et al., Proc. Natl. Acad. Sci. USA 96:13638-13643 (1999)) and provides the opportunity to express a protein as to two inactive fragments that subsequently undergo ligation to form a functional product, e.g., as shown in FIGS. 66 and 67 with regard to the formation of a complete PE fusion protein from two separately-expressed halves.

[0414] In various embodiments described herein, the continuous evolution methods (e.g., PACE) may be used to evolve a first portion of a base editor. A first portion could include a single component or domain, e.g., a Cas9 domain, a deaminase domain, or a UGI domain. The separately evolved component or domain can be then fused to the remaining portions of the base editor within a cell by separately express both the evolved portion and the remaining non-evolved portions with split-intein polypeptide domains. The first portion could more broadly include any first amino acid portion of a base editor that is desired to be evolved using a continuous evolution method described herein. The second portion would in this embodiment refer to the remaining amino acid portion of the base editor that is not evolved using the herein methods. The evolved first portion and the second portion of the base editor could each be expressed with split-intein polypeptide domains in a cell. The natural protein splicing mechanisms of the cell would reassemble the evolved first portion and the non-evolved second portion to form a single fusion protein evolved base editor. The evolved first portion may comprise either the N- or C-terminal part of the single fusion protein. In an analogous manner, use of a second orthogonal trans-splicing intein pair could allow the evolved first portion to comprise an internal part of the single fusion protein.

[0415] Thus, any of the evolved and non-evolved components of the base editors herein described may be expressed with split-intein tags in order to facilitate the formation of a complete base editor comprising the evolved and non-evolved component within a cell.

[0416] The mechanism of the protein splicing process has been studied in great detail (Chong, et al., J. Biol. Chem. 1996, 271, 22159-22168; Xu, M-Q & Perler, F. B. EMBO Journal, 1996, 15, 5146-5153) and conserved amino acids have been found at the intein and extein splicing points (Xu, et al., EMBO Journal, 1994, 13 5517-522). The constructs described herein contain an intein sequence fused to the 5′-terminus of the first gene (e.g., the evolved portion of the base editor). Suitable intein sequences can be selected from any of the proteins known to contain protein splicing elements. A database containing all known inteins can be found on the World Wide Web (Perler, F. B. Nucleic Acids Research, 1999, 27, 346-347). The intein sequence is fused at the 3′ end to the 5′ end of a second gene. For targeting of this gene to a certain organelle, a peptide signal can be fused to the coding sequence of the gene. After the second gene, the intein-gene sequence can be repeated as often as desired for expression of multiple proteins in the same cell. For multi-intein containing constructs, it may be useful to use intein elements from different sources. After the sequence of the last gene to be expressed, a transcription termination sequence must be inserted. In one embodiment, a modified intein splicing unit is designed so that it can both catalyze excision of the exteins from the inteins as well as prevent ligation of the exteins. Mutagenesis of the C-terminal extein junction in the Pyrococcus species GB-D DNA polymerase was found to produce an altered splicing element that induces cleavage of exteins and inteins but prevents subsequent ligation of the exteins (Xu, M-Q & Perler, F. B. EMBO Journal, 1996, 15, 5146-5153). Mutation of serine 538 to either an alanine or glycine induced cleavage but prevented ligation. Mutation of equivalent residues in other intein splicing units should also prevent extein ligation due to the conservation of amino acids at the C-terminal extein junction to the intein. A preferred intein not containing an endonuclease domain is the Mycobacterium xenopi GyrA protein (Telenti, et al. J. Bacteriol. 1997, 179, 6378-6382). Others have been found in nature or have been created artificially by removing the endonuclease domains from endonuclease containing inteins (Chong, et al. J. Biol. Chem. 1997, 272, 15587-15590). In a preferred embodiment, the intein is selected so that it consists of the minimal number of amino acids needed to perform the splicing function, such as the intein from the Mycobacterium xenopi GyrA protein (Telenti, A., et al., J. Bacteriol. 1997, 179, 6378-6382). In an alternative embodiment, an intein without endonuclease activity is selected, such as the intein from the Mycobacterium xenopi GyrA protein or the Saccharaomyces cerevisiae VMA intein that has been modified to remove endonuclease domains (Chong, 1997). Further modification of the intein splicing unit may allow the reaction rate of the cleavage reaction to be altered allowing protein dosage to be controlled by simply modifying the gene sequence of the splicing unit.

[0417] Inteins can also exist as two fragments encoded by two separately transcribed and translated genes. These so-called split inteins self-associate and catalyze protein-splicing activity in trans. Split inteins have been identified in diverse cyanobacteria and archaea (Caspi et al, Mol Microbiol. 50: 1569-1577 (2003); Choi J. et al, J Mol Biol. 556: 1093-1106 (2006.); Dassa B. et al, Biochemistry. 46:322-330 (2007.); Liu X. and Yang J., J Biol Chem. 275:26315-26318 (2003); Wu H. et al.

[0418] Proc Natl Acad Sci USA. £5:9226-9231 (1998.); and Zettler J. et al, FEBS Letters. 553:909-914 (2009)), but have not been found in eukaryotes thus far. Recently, a bioinformatic analysis of environmental metagenomic data revealed 26 different loci with a novel genomic arrangement. At each locus, a conserved enzyme coding region is interrupted by a split intein, with a freestanding endonuclease gene inserted between the sections coding for intein subdomains. Among them, five loci were completely assembled: DNA helicases (gp41-1, gp41-8); Inosine-5′-monophosphate dehydrogenase (IMPDH-1); and Ribonucleotide reductase catalytic subunits (NrdA-2 and NrdJ-1). This fractured gene organization appears to be present mainly in phages (Dassa et al, Nucleic Acids Research. 57:2560-2573 (2009)).

[0419] The split intein Npu DnaE was characterized as having the highest rate reported for the protein trans-splicing reaction. In addition, the Npu DnaE protein splicing reaction is considered robust and high-yielding with respect to different extein sequences, temperatures from 6 to 37° C., and the presence of up to 6M Urea (Zettler J. et al, FEBS Letters. 553:909-914 (2009); Iwai I. et al, FEBS Letters 550: 1853-1858 (2006)). As expected, when the Cysl Ala mutation at the N-domain of these inteins was introduced, the initial N to S- acyl shift and therefore protein splicing was blocked. Unfortunately, the C-terminal cleavage reaction was also almost completely inhibited. The dependence of the asparagine cyclization at the C-terminal splice junction on the acyl shift at the N-terminal scissile peptide bond seems to be a unique property common to the naturally split DnaE intein alleles (Zettler J. et al. FEBS Letters. 555:909-914 (2009)).

[0420] The mechanism of protein splicing typically has four steps [29-30]: 1) an N-S or N-O acyl shift at the intein N-terminus, which breaks the upstream peptide bond and forms an ester bond between the N- extein and the side chain of the intein's first amino acid (Cys or Ser); 2) a transesterification relocating the N-extein to the intein C-terminus, forming a new ester bond linking the N-extein to the side chain of the C-extein's first amino acid (Cys, Ser, or Thr); 3) Asn cyclization breaking the peptide bond between the intein and the C-extein; and 4) a S-N or O-N acyl shift that replaces the ester bond with a peptide bond between the N-extein and C-extein.

[0421] Protein trans-splicing, catalyzed by split inteins, provides an entirely enzymatic method for protein ligation [31]. A split-intein is essentially a contiguous intein (e.g. a mini-intein) split into two pieces named N-intein and C-intein, respectively. The N-intein and C-intein of a split intein can associate non-covalently to form an active intein and catalyze the splicing reaction essentially in same way as a contiguous intein does. Split inteins have been found in nature and also engineered in laboratories [31-35]. As used herein, the term “split intein” refers to any intein in which one or more peptide bond breaks exists between the N-terminal and C-terminal amino acid sequences such that the N-terminal and C-terminal sequences become separate molecules that can non-covalently reassociate, or reconstitute, into an intein that is functional for trans-splicing reactions. Any catalytically active intein, or fragment thereof, may be used to derive a split intein for use in the methods of the invention. For example, in one aspect the split intein may be derived from a eukaryotic intein. In another aspect, the split intein may be derived from a bacterial intein. In another aspect, the split intein may be derived from an archaeal intein. Preferably, the split intein so-derived will possess only the amino acid sequences essential for catalyzing trans-splicing reactions.

[0422] As used herein, the “N-terminal split intein (In)” refers to any intein sequence that comprises an N- terminal amino acid sequence that is functional for trans-splicing reactions. An In thus also comprises a sequence that is spliced out when trans-splicing occurs. An In can comprise a sequence that is a modification of the N-terminal portion of a naturally occurring intein sequence. For example, an In can comprise additional amino acid residues and/or mutated residues so long as the inclusion of such additional and/or mutated residues does not render the In non-functional in trans-splicing. Preferably, the inclusion of the additional and/or mutated residues improves or enhances the trans-splicing activity of the In.

[0423] As used herein, the “C-terminal split intein (Ic)” refers to any intein sequence that comprises a C- terminal amino acid sequence that is functional for trans-splicing reactions. In one aspect, the Ic comprises 4 to 7 contiguous amino acid residues, at least 4 amino acids of which are from the last β-strand of the intein from which it was derived. An Ic thus also comprises a sequence that is spliced out when trans-splicing occurs. An Ic can comprise a sequence that is a modification of the C-terminal portion of a naturally occurring intein sequence. For example, an Ic can comprise additional amino acid residues and/or mutated residues so long as the inclusion of such additional and/or mutated residues does not render the In non-functional in trans-splicing. Preferably, the inclusion of the additional and/or mutated residues improves or enhances the trans-splicing activity of the Ic.

[0424] In some embodiments of the invention, a peptide linked to an Ic or an In can comprise an additional chemical moiety including, among others, fluorescence groups, biotin, polyethylene glycol (PEG), amino acid analogs, unnatural amino acids, phosphate groups, glycosyl groups, radioisotope labels, and pharmaceutical molecules. In other embodiments, a peptide linked to an Ic can comprise one or more chemically reactive groups including, among others, ketone, aldehyde, Cys residues and Lys residues. The N-intein and C-intein of a split intein can associate non-covalently to form an active intein and catalyze the splicing reaction when an “intein-splicing polypeptide (ISP)” is present. As used herein, “intein-splicing polypeptide (ISP)” refers to the portion of the amino acid sequence of a split intein that remains when the Ic, In, or both, are removed from the split intein. In certain embodiments, the In comprises the ISP. In another embodiment, the Ic comprises the ISP. In yet another embodiment, the ISP is a separate peptide that is not covalently linked to In nor to Ic.

[0425] Split inteins may be created from contiguous inteins by engineering one or more split sites in the unstructured loop or intervening amino acid sequence between the −12 conserved beta-strands found in the structure of mini-inteins [25-28]. Some flexibility in the position of the split site within regions between the beta-strands may exist, provided that creation of the split will not disrupt the structure of the intein, the structured beta-strands in particular, to a sufficient degree that protein splicing activity is lost.

[0426] In protein trans-splicing, one precursor protein consists of an N-extein part followed by the N-intein, another precursor protein consists of the C-intein followed by a C-extein part, and a trans-splicing reaction (catalyzed by the N- and C-inteins together) excises the two intein sequences and links the two extein sequences with a peptide bond. Protein trans-splicing, being an enzymatic reaction, can work with very low (e.g. micromolar) concentrations of proteins and can be carried out under physiological conditions.

### [2] Other Programmable Nucleases

[0427] In various embodiments described herein, the prime editors comprise a napDNAbp, such as a Cas9 protein. These proteins are “programmable” by way of their becoming complexed with a guide RNA (or a PEgRNA, as the case may be), which guides the Cas9 protein to a target site on the DNA which possess a sequence that is complementary to the spacer portion of the gRNA (or PEgRNA) and also which possesses the required PAM sequence. However, in certain embodiment envisioned here, the napDNAbp may be substituted with a different type of programmable protein, such as a zinc finger nuclease or a transcription activator-like effector nuclease (TALEN).

[0428] FIG. 1J depicts such a variation of prime editing contemplated herein that replaces the napDNAbp (e.g., SpCas9 nickase) with any programmable nuclease domain, such as zinc finger nucleases (ZFN) or transcription activator-like effector nucleases (TALEN). As such, it is contemplated that suitable nucleases do not necessarily need to be “programmed” by a nucleic acid targeting molecule (such as a guide RNA), but rather, may be programmed by defining the specificity of a DNA-binding domain, such as and in particular, a nuclease. Just as in prime editing with napDNAbp moities, it is preferable that such alternative programmable nucleases be modified such that only one strand of a target DNA is cut. In other words, the programmable nucleases should function as nickases, preferably. Once a programmable nuclease is selected (e.g., a ZFN or a TALEN), then additional functionalities may be engineered into the system to allow it to operate in accordance with a prime editing-like mechanism. For example, the programmable nucleases may be modified by coupling (e.g., via a chemical linker) an RNA or DNA extension arm thereto, wherein the extension arm comprises a primer binding site (PBS) and a DNA synthesis template. The programmable nuclease may also be coupled (e.g., via a chemical or amino acid linker) to a polymerase, the nature of which will depend upon whether the extension arm is DNA or RNA. In the case of an RNA extension arm, the polymerase can be an RNA-dependent DNA polymerase (e.g., reverse transcriptase). In the case of a DNA extension arm, the polymerase can be a DNA-dependent DNA polymerase (e.g., a prokaryotic polymerase, including Pol I, Pol II, or Pol III, or a eukaryotic polymerase, including Pol a, Pol b, Pol g, Pol d, Pol e, or Pol z). The system may also include other functionalities added as fusions to the programmable nucleases, or added in trans to facilitate the reaction as a whole (e.g., (a) a helicase to unwind the DNA at the cut site to make the cut strand with the 3′ end available as a primer, (b) a FEN1 to help remove the endogenous strand on the cut strand to drive the reaction towards replacement of the endogenous strand with the synthesized strand, or (c) a nCas9:gRNA complex to create a second site nick on the opposite strand, which may help drive the integration of the synthesize repair through favored cellular repair of the non-edited strand). In an analogous manner to prime editing with a napDNAbp, such a complex with an otherwise programmable nuclease could be used to synthesize and then install a newly synthesized replacement strand of DNA carrying an edit of interest permanently into a target site of DNA.

[0429] Suitable alternative programmable nucleases are well known in the art which may be used in place of a napDNAbp:gRNA complex to construct an alternative prime editor system that can be programmed to selectively bind a target site of DNA, and which can be further modified in the manner described above to co-localize a polymerase and an RNA or DNA extension arm comprising a primer binding site and a DNA synthesis template to specific nick site. For example, and as represented in FIG. 1J, Transcription Activator-Like Effector Nucleases (TALENs) may be used as the programmable nuclease in the prime editing methods and compositions of matter described herein. TALENS are artificial restriction enzymes generated by fusing the TAL effector DNA binding domain to a DNA cleavage domain. These reagents enable efficient, programmable, and specific DNA cleavage and represent powerful tools for genome editing in situ. Transcription activator-like effectors (TALEs) can be quickly engineered to bind practically any DNA sequence. The term TALEN, as used herein, is broad and includes a monomeric TALEN that can cleave double stranded DNA without assistance from another TALEN. The term TALEN is also used to refer to one or both members of a pair of TALENs that are engineered to work together to cleave DNA at the same site. TALENs that work together may be referred to as a left-TALEN and a right-TALEN, which references the handedness of DNA. See U.S. Ser. No. 12/965,590; U.S. Ser. No. 13/426,991 (U.S. Pat. No. 8,450,471); U.S. Ser. No. 13/427,040 (U.S. Pat. No. 8,440,431); U.S. Ser. No. 13/427,137 (U.S. Pat. No. 8,440,432); and U.S. Ser. No. 13/738,381, all of which are incorporated by reference herein in their entirety. In addition, TALENS are described in WO 2015/027134, U.S. Pat. No. 9,181,535, Boch et al., “Breaking the Code of DNA Binding Specificity of TAL-Type III Effectors”, Science, vol. 326, pp. 1509-1512 (2009), Bogdanove et al., TAL Effectors: Customizable Proteins for DNA Targeting, Science, vol. 333, pp. 1843-1846 (2011), Cade et al., “Highly efficient generation of heritable zebrafish gene mutations using homo- and heterodimeric TALENs”, Nucleic Acids Research, vol. 40, pp. 8001-8010 (2012), and Cermak et al., “Efficient design and assembly of custom TALEN and other TAL effector-based constructs for DNA targeting”, Nucleic Acids Research, vol. 39, No. 17, e82 (2011), each of which are incorporated herein by reference.

[0430] As represented in FIG. 1J, zinc finger nucleases may also be used as alternative programmable nucleases for use in prime editing in place of napDNAbps, such as Cas9 nickases. Like with TALENS, the ZFN proteins may be modified such that they function as nickases, i.e., engineering the ZFN such that it cleaves only one strand of the target DNA in a manner similar to the napDNAbp used with the prime editors described herein. ZFN proteins have been extensively described in the art, for example, in Carroll et al., “Genome Engineering with Zinc-Finger Nucleases,” Genetics, August 2011, Vol. 188: 773-782; Dural et al., “Zinc finger nucleases: custom-designed molecular scissors for genome engineering of plant and mammalian cells,” Nucleic Acids Res, 2005, Vol. 33: 5978-90; and Gaj et al., “ZFN, TALEN, and CRISPR/Cas-based methods for genome engineering,” Trends Biotechnol. 2013, Vol. 31: 397-405, each of which are incorporated herein by reference in their entireties.

### [3] Polymerases (e.g., Reverse Transcriptases)

[0431] In various embodiments, the prime editor (PE) system disclosed herein includes a polymerase (e.g., DNA-dependent DNA polymerase or RNA-dependent DNA polymerase, such as, reverse transcriptase), or a variant thereof, which can be provided as a fusion protein with a napDNAbp or other programmable nuclease, or provide in trans.

[0432] Any polymerase may be used in the prime editors dislosed herein. The polymerases may be wild type polymerases, functional fragments, mutants, variants, or truncated variants, and the like. The polymerases may include wild type polymerases from eukaryotic, prokaryotic, archael, or viral organisms, and/or the polymerases may be modified by genetic engineering, mutagenesis, directed evolution-based processes. The polymerases may include T7 DNA polymerase, T5 DNA polymerase, T4 DNA polymerase, Klenow fragment DNA polymerase, DNA polymerase III and the like. The polymerases may also be thermostable, and may include Taq, Tne, Tma, Pfu, Tfl, Tth, Stoffel fragment, VENT® and DEEPVENT® DNA polymerases, KOD, Tgo, JDF3, and mutants, variants and derivatives thereof (see U.S. Pat. Nos. 5,436,149; 4,889,818; 4,965,185; 5,079,352; 5,614,365; 5,374,553; 5,270,179; 5,047,342; 5,512,462; WO 92/06188; WO 92/06200; WO 96/10640; Barnes, W. M., Gene 112:29-35 (1992); Lawyer, F. C., et al., PCR Meth. Appl. 2:275-287 (1993); Flaman, J.-M, et al., Nuc. Acids Res. 22(15):3259-3260 (1994), each of which are incorporated by reference). For synthesis of longer nucleic acid molecules (e.g, nucleic acid molecules longer than about 3-5 Kb in length), at least two DNA polymerases can be employed. In certain embodiments, one of the polymerases can be substantially lacking a 3′ exonuclease activity and the other may have a 3′ exonuclease activity. Such pairings may include polymerases that are the same or different. Examples of DNA polymerases substantially lacking in 3′ exonuclease activity include, but are not limited to, Taq, Tne(exo-), Tma(exo-), Pfu(exo-), Pwo(exo-), exo-KOD and Tth DNA polymerases, and mutants, variants and derivatives thereof.

[0433] Preferably, the polymerase usable in the prime editors disclosed herein are “template-dependent” polymerase (since the polymerases are intended to rely on the DNA synthesis template to specify the sequence of the DNA strand under synthesis during prime editing. As used herein, the term “template DNA molecule” refers to that strand of a nucleic acid from which a complementary nucleic acid strand is synthesized by a DNA polymerase, for example, in a primer extension reaction of the DNA synthesis template of a PEgRNA.

[0434] As used herein, the term “template dependent manner” is intended to refer to a process that involves the template dependent extension of a primer molecule (e.g., DNA synthesis by DNA polymerase). The term “template dependent manner” refers to polynucleotide synthesis of RNA or DNA wherein the sequence of the newly synthesized strand of polynucleotide is dictated by the well-known rules of complementary base pairing (see, for example, Watson, J. D. et al., In: Molecular Biology of the Gene, 4th Ed., W. A. Benjamin, Inc., Menlo Park, Calif. (1987)). The term “complementary” refers to the broad concept of sequence complementarity between regions of two polynucleotide strands or between two nucleotides through base-pairing. It is known that an adenine nucleotide is capable of forming specific hydrogen bonds (“base pairing”) with a nucleotide which is thymine or uracil. Similarly, it is known that a cytosine nucleotide is capable of base pairing with a guanine nucleotide. As such, in the case of prime editing, it can be said that the single strand of DNA synthesized by the polymerase of the prime editor against the DNA synthesis template is said to be “complementary” to the sequence of the DNA synthesis template.

[0435] A. Exemplary Polymerases

[0436] In various embodiments, the prime editors described herein comprise a polymerase. The disclosure contemplates any wild type polymerase obtained from any naturally-occurring organim or virus, or obtained from a commercial or non-commercial source. In addition, the polymerases usable in the prime editors of the disclosure can include any naturally-occuring mutant polymerase, engineered mutant polymerase, or other variant polymerase, including truncated variants that retain function. The polymerases usable herein may also be engineered to contain specific amino acid substitutions, such as those specifically disclosed herein. In certain preferred embodiments, the polymerases usable in the prime editors of the disclosure are template-based polymerases, i.e., they synthesize nucleotide sequences in a template-dependent manner.

[0437] A polymerase is an enzyme that synthesizes a nucleotide strand and which may be used in connection with the prime editor systems described herein. The polymerases are preferrably “template-dependent” polymerases (i.e., a polymerase which synthesizes a nucleotide strand based on the order of nucleotide bases of a template strand). In certain configurations, the polymerases can also be a “template-independent” (i.e., a polymerase which synthesizes a nucleotide strand without the requirement of a template strand). A polymerase may also be further categorized as a “DNA polymerase” or an “RNA polymerase.” In various embodiments, the prime editor system comprises a DNA polymerase. In various embodiments, the DNA polymerase can be a “DNA-dependent DNA polymerase” (i.e., whereby the template molecule is a strand of DNA). In such cases, the DNA template molecule can be a PEgRNA, wherein the extension arm comprises a strand of DNA. In such cases, the PEgRNA may be referred to as a chimeric or hybrid PEgRNA which comprises an RNA portion (i.e., the guide RNA components, including the spacer and the gRNA core) and a DNA portion (i.e., the extension arm). In various other embodiments, the DNA polymerase can be an “RNA-dependent DNA polymerase” (i.e., whereby the template molecule is a strand of RNA). In such cases, the PEgRNA is RNA, i.e., including an RNA extension. The term “polymerase” may also refer to an enzyme that catalyzes the polymerization of nucleotide (i.e., the polymerase activity). Generally, the enzyme will initiate synthesis at the 3′-end of a primer annealed to a polynucleotide template sequence (e.g., such as a primer sequence annealed to the primer binding site of a PEgRNA), and will proceed toward the 5′ end of the template strand. A “DNA polymerase” catalyzes the polymerization of deoxynucleotides. As used herein in reference to a DNA polymerase, the term DNA polymerase includes a “functional fragment thereof”. A “functional fragment thereof” refers to any portion of a wild-type or mutant DNA polymerase that encompasses less than the entire amino acid sequence of the polymerase and which retains the ability, under at least one set of conditions, to catalyze the polymerization of a polynucleotide. Such a functional fragment may exist as a separate entity, or it may be a constituent of a larger polypeptide, such as a fusion protein.

[0438] In some embodiments, the polymerases can be from bacteriophage. Bacteriophage DNA polymerases are generally devoid of 5′ to 3′ exonuclease activity, as this activity is encoded by a separate polypeptide. Examples of suitable DNA polymerases are T4, T7, and phi29 DNA polymerase. The enzymes available commercially are: T4 (available from many sources e.g., Epicentre) and T7 (available from many sources, e.g. Epicentre for unmodified and USB for 3′ to 5′ exo T7 “Sequenase” DNA polymerase).

[0439] The other embodiments, the polymerases are archaeal polymerases. There are 2 different classes of DNA polymerases which have been identified in archaea: 1. Family B/pol I type (homologs of Pfu from Pyrococcus furiosus) and 2. pol II type (homologs of P. furiosus DP1/DP2 2-subunit polymerase). DNA polymerases from both classes have been shown to naturally lack an associated 5′ to 3′ exonuclease activity and to possess 3′ to 5′ exonuclease (proofreading) activity. Suitable DNA polymerases (pol I or pol II) can be derived from archaea with optimal growth temperatures that are similar to the desired assay temperatures.

[0440] Thermostable archaeal DNA polymerases are isolated from Pyrococcus species (furiosus, species GB-D, woesii, abysii, horikoshii), Thermococcus species (kodakaraensis KOD1, litoralis, species 9 degrees North-7, species JDF-3, gorgonarius), Pyrodictium occultum, and Archaeoglobus fulgidus.

[0441] Polymerases may also be from eubacterial species. There are 3 classes of eubacterial DNA polymerases, pol I, II, and III. Enzymes in the Pol I DNA polymerase family possess 5′ to 3′ exonuclease activity, and certain members also exhibit 3′ to 5′ exonuclease activity. Pol II DNA polymerases naturally lack 5′ to 3′ exonuclease activity, but do exhibit 3′ to 5′ exonuclease activity. Pol III DNA polymerases represent the major replicative DNA polymerase of the cell and are composed of multiple subunits. The pol III catalytic subunit lacks 5′ to 3′ exonuclease activity, but in some cases 3′ to 5′ exonuclease activity is located in the same polypeptide.

[0442] There are a variety of commercially available Pol I DNA polymerases, some of which have been modified to reduce or abolish 5′ to 3′ exonuclease activity.

[0443] Suitable thermostable pol I DNA polymerases can be isolated from a variety of thermophilic eubacteria, including Thermus species and Thermotoga maritima such as Thermus aquaticus (Taq), Thermus thermophilus (Tth) and Thermotoga maritima (Tma UlTma).

[0444] Additional eubacteria related to those listed above are described in Thermophilic Bacteria (Kristjansson, J. K., ed.) CRC Press, Inc., Boca Raton, Fla., 1992.

[0445] The invention further provides for chimeric or non-chimeric DNA polymerases that are chemically modified according to methods disclosed in U.S. Pat. Nos. 5,677,152, 6,479,264 and 6,183,998, the contents of which are hereby incorporated by reference in their entirety.

[0446] Additional archaea DNA polymerases related to those listed above are described in the following references: Archaea: A Laboratory Manual (Robb, F. T. and Place, A. R., eds.), Cold Spring Harbor Laboratory Press, Cold Spring Harbor, N.Y., 1995 and Thermophilic Bacteria (Kristjansson, J. K., ed.) CRC Press, Inc., Boca Raton, Fla., 1992.

[0447] B. Exemplarly Reverse Transcriptases

[0448] In various embodiments, the prime editors described herein comprise a reverse transcriptase as the polymerase. The disclosure contemplates any wild type reverse transcriptase obtained from any naturally-occurring organim or virus, or obtained from a commercial or non-commercial source. In addition, the reverse transcriptases usable in the prime editors of the disclosure can include any naturally-occuring mutant RT, engineered mutant RT, or other variant RT, including truncated variants that retain function. The RTs may also be engineered to contain specific amino acid substitutions, such as those specifically disclosed herein.

[0449] Reverse transcriptases are multi-functional enzymes typically with three enzymatic activities including RNA- and DNA-dependent DNA polymerization activity, and an RNaseH activity that catalyzes the cleavage of RNA in RNA-DNA hybrids. Some mutants of reverse transcriptases have disabled the RNaseH moiety to prevent unintended damage to the mRNA. These enzymes that synthesize complementary DNA (cDNA) using mRNA as a template were first identified in RNA viruses. Subsequently, reverse transcriptases were isolated and purified directly from virus particles, cells or tissues. (e.g., see Kacian et al., 1971, Biochim. Biophys. Acta 46: 365-83; Yang et al., 1972, Biochem. Biophys. Res. Comm. 47: 505-11; Gerard et al., 1975, J. Virol. 15: 785-97; Liu et al., 1977, Arch. Virol. 55 187-200; Kato et al., 1984, J. Virol. Methods 9: 325-39; Luke et al., 1990, Biochem. 29: 1764-69 and Le Grice et al., 1991, J. Virol. 65: 7004-07, each of which are incorporated by reference). More recently, mutants and fusion proteins have been created in the quest for improved properties such as thermostability, fidelity and activity. Any of the wild type, variant, and/or mutant forms of reverse transcriptase which are known in the art or which can be made using methods known in the art are contemplated herein.

[0450] The reverse transcriptase (RT) gene (or the genetic information contained therein) can be obtained from a number of different sources. For instance, the gene may be obtained from eukaryotic cells which are infected with retrovirus, or from a number of plasmids which contain either a portion of or the entire retrovirus genome. In addition, messenger RNA-like RNA which contains the RT gene can be obtained from retroviruses. Examples of sources for RT include, but are not limited to, Moloney murine leukemia virus (M-MLV or MLVRT); human T-cell leukemia virus type 1 (HTLV-1); bovine leukemia virus (BLV); Rous Sarcoma Virus (RSV); human immunodeficiency virus (HIV); yeast, including Saccharomyces, Neurospora, Drosophila; primates; and rodents. See, for example, Weiss, et al., U.S. Pat. No. 4,663,290 (1987); Gerard, G. R., DNA: 271-79 (1986); Kotewicz, M. L., et al., Gene 35:249-58 (1985); Tanese, N., et al., Proc. Natl. Acad. Sci. (USA): 4944-48 (1985); Roth, M. J., at al., J. Biol. Chem. 260:9326-35 (1985); Michel, F., et al., Nature 316:641-43 (1985); Akins, R. A., et al., Cell 47:505-16 (1986), EMBO J. 4:1267-75 (1985); and Fawcett, D. F., Cell 47:1007-15 (1986) (each of which are incorporated herein by reference in their entireties).

### Wild Type RTs

[0451] Exemplary enzymes for use with the herein disclosed prime editors can include, but are not limited to, M-MLV reverse transcriptase and RSV reverse transcriptase. Enzymes having reverse transcriptase activity are commercially available. In certain embodiments, the reverse transcriptase provided in trans to the other components of the prime editor (PE) system. That is, the reverse transcriptase is expressed or otherwise provided as an individual component, i.e., not as a fusion protein with a napDNAbp.

[0452] A person of ordinary skill in the art will recognize that wild type reverse transcriptases, including but not limited to, Moloney Murine Leukemia Virus (M-MLV); Human Immunodeficiency Virus (HIV) reverse transcriptase and avian Sarcoma-Leukosis Virus (ASLV) reverse transcriptase, which includes but is not limited to Rous Sarcoma Virus (RSV) reverse transcriptase, Avian Myeloblastosis Virus (AMV) reverse transcriptase, Avian Erythroblastosis Virus (AEV) Helper Virus MCAV reverse transcriptase, Avian Myelocytomatosis Virus MC29 Helper Virus MCAV reverse transcriptase, Avian Reticuloendotheliosis Virus (REV-T) Helper Virus REV-A reverse transcriptase, Avian Sarcoma Virus UR2 Helper Virus UR2AV reverse transcriptase, Avian Sarcoma Virus Y73 Helper Virus YAV reverse transcriptase, Rous Associated Virus (RAV) reverse transcriptase, and Myeloblastosis Associated Virus (MAV) reverse transcriptase may be suitably used in the subject methods and composition described herein.

[0453] Exemplary wild type RT enzymes are as follows:

| DESCRIPTION | SEQUENCE |
|---|---|
| REVERSE | TLNIEDEYRLHETSKEPDVSLGSTWLSDFPQAWAETGGMGLA |
| TRANSCRIPTASE | VRQAPLIIPLKATSTPVSIKQYPMSQEARLGIKPHIQRLLDQGIL |
| (M-MLV RT) WILD | VPCQSPWNTPLLPVKKPGTNDYRPVQDLREVNKRVEDIHPTV |
| TYPE | PNPYNLLSGLPPSHQWYTVLDLKDAFFCLRLHPTSQPLFAFEW |
| MOLONEY MURINE | RDPEMGISGQLTWTRLPQGFKNSPTLFDEALHRDLADFRIQHP |
| LEUKEMIA VIRUS | DLILLQYVDDLLLAATSELDCQQGTRALLQTLGNLGYRASAK |
| USED IN PE1 (PRIME | KAQICQKQVKYLGYLLKEGQRWLTEARKETVMGQPTPKTPR |
| EDITOR 1 FUSION | QLREFLGTAGFCRLWIPGFAEMAAPLYPLTKTGTLFNWGPDQ |
| PROTEIN | QKAYQEIKQALLTAPALGLPDLTKPFELFVDEKQGYAKGVLTQ |
| DISCLOSED | KLGPWRRPVAYLSKKLDPVAAGWPPCLRMVAAIAVLTKDAGK |
| HEREIN) | LTMGQPLVILAPHAVEALVKQPPDRWLSNARMTHYQALLLDT |
| | DRVQFGPVVALNPATLLPLPEEGLQHNCLDILAEAHGTRPDLT |
| | DQPLPDADHTWYTDGSSLLQEGQRKAGAAVTTETEVIWAKA |
| | LPAGTSAQRAELIALTQALKMAEGKKLNVYTDSRYAFATAHIH |
| | GEIYRRRGLLTSEGKEIKNKDEILALLKALFLPKRLSIIHCPGHQ |
| | KGHSAEARGNRMADQAARKAAITETPDTSTLLIENSSP (SEQ |
| | ID NO: 89) |
| REVERSE | AFPLERPDWDYTTQAGRNHLVHYRQLLLAGLQNAGRSPTNL |
| TRANSCRIPTASE | AKVKGITQGPNESPSAFLERLKEAYRRYTPYDPEDPGQETNVS |
| MOLONEY MURINE | MSFIWQSAPDIGRKLGRLEDLKSKTLGDLVREAEKIFNKRETP |
| LEUKEMIA VIRUS | EEREERIRRETEEKEERRRTVDEQKEKERDRRRHREMSKLLAT |
| REF SEQ. | VVIGQEQDRQEGERKRPQLDKDQCAYCKEKGHWAKDCPKKP |
| AAA66622.1 | RGPRGPRPQTSLLTLGDXGGQGQDPPPEPRITLKVGGQPVTFL |
| | VDTGAQHSVLTQNPGPLSDKSAWVQGATGGKRYRWTTDRKV |
| | HLATGKVTHSFLHVPDCPYPLLGRDLLTKLKAQIHFEGSGAQV |
| | VGPMGQPLQVLTLNIEDEYRLHETSKEPDVSLGFTWLSDFPQA |
| | WAESGGMGLAVRQAPLIIPLKATSTPVSIKQYPMSQEARLGIKP |
| | HIQRLLDQGILVPCQSPWNTPLLPVKKPGTNDYRPVQDLREV |
| | NKRVEDIHPTVPNPYNLLSGLPPSHQWYTVLDLKDAFFCLRL |
| | HPTSQPLFAFEWRDPEMGISGQLTWTRLPQGFKNSPTLFDEAL |
| | HRDLADFR (SEQ ID NO: 90) |
| REVERSE | TLQLEEEYRLFEPESTQKQEMDIWLKNFPQAWAETGGMGTAH |
| TRANSCRIPTASE | CQAPVLIQLKATATPISIRQYPMPHEAYQGIKPHIRRMLDQGIL |
| FELINE LEUKEMIA | KPCQSPWNTPLLPVKKPGTEDYRPVQDLREVNKRVEDIHPTV |
| VIRUS | PNPYNLLSTLPPSHPWYTVLDLKDAFFCLRLHSESQLLFAFEW |
| REF SEQ. NP955579.1 | RDPEIGLSGQLTWTRLPQGFKNSPTLFDEALHSDLADFRVRYP |
| | ALVLLQYVDDLLLAAATRTECLEGTKALLETLGNKGYRASAK |
| | KAQICLQEVTYLGYSLKDGQRWLTKARKEAILSIPVPKNSRQV |
| | REFLGTAGYCRLWIPGFAELAAPLYPLTRPGTLFQWGTEQQLA |
| | FEDIKKALLSSPALGLPDITKPFELFIDENSGFAKGVLVQKLGP |
| | WKRPVAYLSKKLDTVASGWPPCLRMVAAIAILVKDAGKLTLG |
| | QPLTILTSHPVEALVRQPPNKWLSNARMTHYQAMLLDAERVH |
| | FGPTVSLNPATLLPLPSGGNHHDCLQILAETHGTRPDLTDQPLP |
| | DADLTWYTDGSSFIRNGEREAGAAVTTESEVIWAAPLPPGTSA |
| | QRAELIALTQALKMAEGKKLTVYTDSRYAFATTHVHGEIYRRR |
| | GLLTSEGKEIKNKNEILALLEALFLPKRLSIIHCPGHQKGDSPQ |
| | AKGNRLADDTAKKAATETHSSLTVL |
| | SEQ ID NO: 91) |
| REVERSE | PISPIETVPVKLKPGMDGPKVKQWPLTEEKIKALVEICTEMEKE |
| TRANSCRIPTASE | GKISKIGPENPYNTPVFAIKKKDSTKWRKLVDFRELNKRTQDF |
| HIV-1 RT, CHAIN A | WEVQLGIPHPAGLKKKKSVTVLDVGDAYFSVPLDEDFRKYTA |
| REF SEQ. ITL3-A | FTIPSINNETPGIRYQYNVLPQGWKGSPAIFQSSMTKILEPFRKQ |
| | NPDIVIYQYMDDLYVGSDLEIGQHRTKIEELRQHLLRWGLTTP |
| | DKKHQKEPPFLWMGYELHPDKWTVQPIVLPEKDSWTVNDIQ |
| | KLVGKLNWASQIYPGIKVRQLXKLLRGTKALTEVIPLTEEAEL |
| | ELAENREILKEPVHGVYYDPSKDLIAEIQKQGQGQWTYQIYQ |
| | EPFKNLKTGKYARMRGAHTNDVKQLTEAVQKITTESIVIWGK |
| | TPKFKLPIQKETWETWWTEYWQATWIPEWEFVNTPPLVKLW |
| | YQLEKEPIVGAETFYVDGAANRETKLGKAGYVTNRGRQKVV |
| | TLTDTTNQKTELQAIYLALQDSGLEVNIVTDSQYALGIIQAQPD |
| | QSESELVNQIIEQLIKKEKVYLAWVPAHKGIGGNEQVDKLVSA |
| | GIRKV (SEQ ID NO: 92) |
| | SEE MARTINELLI ET AL., VIROLOGY, 1990, 174(1): |
| | 135-144, WHICH IS INCORPORATED BY REFERENCE |
| REVERSE | PISPIETVPVKLKPGMDGPKVKQWPLTEEKIKALVEICTEMEKE |
| TRANSCRIPTASE | GKISKIGPENPYNTPVFAIKKKDSTKWRKLVDFRELNKRTQDF |
| HIV-1 RT, CHAIN B | WEVQLGIPHPAGLKKKKSVTVLDVGDAYFSVPLDEDFRKYTA |
| REF SEQ. ITL3-B | FTIPSINNETPGIRYQYNVLPQGWKGSPAIFQSSMTKILEPFRKQ |
| | NPDIVIYQYMDDLYVGSDLEIGQHRTKIEELRQHLLRWGLTTP |
| | DKKHQKEPPFLWMGYELHPDKWTVQPIVLPEKDSWTVNDIQ |
| | KLVGKLNWASQIYPGIKVRQLCKLLRGTKALTEVIPLTEEAELE |
| | LAENREILKEPVHGVYYDPSKDLIAEIQKQGQGQWTYQIYQEP |
| | FKNLKTGKYARMRGAHTNDVKQLTEAVQKITTESIVIWGKTP |
| | KFKLPIQKETWETWWTEYWQATWIPEWEFVNTPPLVKLWYQ |
| | LEKEPIVGAETF (SEQ ID NO: 93) |
| | SEE STAMMERS ET AL., J. MOL. BIOL., 1994, 242(4): |
| | 586-588, WHICH IS INCORPORATED BY REFERENCE |
| REVERSE | TVALHLAIPLKWKPNHTPVWIDQWPLPEGKLVALTQLVEKEL |
| TRANSCRIPTASE | QLGHIEPSLSCWNTPVFVIRKASGSYRLLHDLRAVNAKLVPFG |
| ROUS SARCOMA | AVQQGAPVLSALPRGWPLMVLDLKDCFFSIPLAEQDREAFAF |
| VIRUS RT | TLPSVNNQAPARRFQWKVLPQGMTCSPTICQLIVGQILEPLRL |
| REF SEQ. ACL14945 | KHPSLRMLHYMDDLLLAASSHDGLEAAGEEVISTLERAGFTIS |
| | PDKVQKEPGVQYLGYKLGSTYAAPVGLVAEPRIATLWDVQKL |
| | VGSLQWLRPALGIPPRLRGPFYEQLRGSDPNEAREWNLDMK |
| | MAWREIVQLSTTAALERWDPALPLEGAVARCEQGAIGVLGQG |
| | LSTHPRPCLWLFSTQPTKAFTAWLEVLTLLITKLRASAVRTFGK |
| | EVDILLLPACFRDELPLPEGILLALRGFAGKIRSSDTPSIFDIARP |
| | LHVSLKVRVTDHPVPGPTVFTDASSSTHKGVVVWREGPRWEI |
| | KEIADLGASVQQLEARAVAMALLLWPTTPTNVVTDSAFVAKM |
| | LLKMGQEGVPSTAAAFILEDALSQRSAMAAVLHVRSHSEVPG |
| | FFTEGNDVADSQATFQAYPLREAKDLHTALHIGPRALSKACNI |
| | SMQQAREVVQTCPHCNSAPALEAGVNPRGLGPLQIWQTDFTL |
| | EPRMAPRSWLAVTVDTASSAIVVTQHGRVTSVAAQHHWATVI |
| | AVLGRPKAIKTDNGSCFTSKSTREWLARWGIAHTTGIPGNSQG |
| | QAMVERANRLLKDKIRVLAEGDGFMKRIPTSKQGELLAKAM |
| | YALNHFERGENTKTPIQKHWRPTVLTEGPPVKIRIETGEWEKG |
| | WNVLVWGRGYAAVKNRDTDKVIWVPSRKVKPDIAQKDEVT |
| | KKDEASPLFA (SEQ ID NO: 94) |
| | SEE YASUKAWA ET AL., J. BIOCHEM. 2009, 145(3): |
| | 315-324, WHICH IS INCORPORATED BY REFERENCE |
| REVERSE | MMDHLLQKTQIQNQTEQVMNITNPNSIYIKGRLYFKGYKKIEL |
| TRANSCRIPTASE | HCFVDTGASLCIASKFVIPEEHWINAERPHVIVKIADGSSITINKV |
| CAULIFLOWER | CRDIDLIIAGEIFHIPTVYQQESGIDFIIGNNFCQLYEPFIQFTDRV |
| MOSAIC VIRUS RT | TTKDRTYPVHIAKLTRAVRVGTEGFLESMKKRSKTQQPEPVNI |
| REF SEQ. AGT42196 | STNKIAILSEGRRLSEEKLFITQQRMQKIEELLEKVCSENPLDP |
| | NKTKQWMKASIKLSDPSKAIKVKPMKYSPMDREEFDKQIKEL |
| | LDLKVIKPSKSPHMAPAFLVNNEAEKRRGKKRMVVNYKAMN |
| | KATVGDAYNLPNKDELLTLIRGKKIFSSFDCKSGFWQVLLDQD |
| | SRPLTAFTCPQGHYEWNVVPFGLKQAPSIFQRHMDEAFRVFR |
| | KFCCVYVDDILVFSNNEEDHLLHVAMILQKCNQHGIILSKKKA |
| | QLFKKKINFLGLEIDEGTHKPQGHILEHINKFPDTLEDKKQLQR |
| | FLGILTYASDYIPKLAQIRKPLQAKLKENVPWKWTKEDTLYM |
| | QKVKKNLQGFPPLHHPLPEEKLIIETDASDDYWGGMLKAIKIN |
| | EGTNTELICRYASGSFKAAEKNYHSNDKETLAVINTIKKFSIYL |
| | TPVHFLIRTDNTHFKSFVNLNYKGDSKLGRNIRWQAWLSHYS |
| | FDVEHIKGTDNHFADFLSREFNRVNS (SEQ ID NO: 95) |
| | SEE FARZADFAR ET AL., VIRUS GENES, 2013, 47(2): |
| | 347-356, WHICH IS INCORPORATED BY REFERENCE |
| REVERSE | MKEKISKIDKNFYTDIFIKTSFQNEFEAGGVIPPIAKNQVSTISN |
| TRANSCRIPTASE | KNKTFYSLAHSSPHYSIQTRIEKFLLKNIPLSASSFAFRKERSYL |
| KLEBSIELLA | HYLEPHTQNVKYCHLDIVSFFHSIDVNIVRDTFSVYFSDEFLVK |
| PNEUMONIA | EKQSLLDAFMASVTLTAELDGVEKTFIPMGFKSSPSISNIIFRKI |
| REF SEQ. RFF81513.1 | DILIQKFCDKNKITYTRYADDLLFSTKKENNILSSTFFINEISSIL |
| | SINTKFKLNKSKYLYKEGTISLGGYVIENILKDNSSGNIRLSSSKL |
| | NPLYKALYEIKKGSSSKHICIKVFNLKLKRFIYKKNKEKFEAKF |
| | YSSQLKNKLLGYRSYLLSFVIFHKKYKCINPIFLEKCVFLISEIE |
| | SIEVINRKF (SEQ ID NO: 96) |
| REVERSE | MKITSNNVTAVINGKGWHSINWKKCHQHVKTIQTRIAKAACN |
| TRANSCRIPTASE | QQWRTVGRLQRLLVRSFSARALAVKRVTENSGRKTPGVDGQI |
| ESCERICHIA COLI | WSTPESKWEATKLRRKGYKPLPLKRVFIPKSNGKKRPLGIPV |
| RT | MLDRAMQALHLLGLEPVSETNADHNSYGFRPARCTADAIQQ |
| REF SEQ. TGH57013 | VCNMYSSRNASKWVLEGDIKGCFEHISHEWLLENIPMDKQIL |
| | RNWLKAGIIEKSIFSKTLSGTPQGGIISPVLANMALDGLERLLQ |
| | NRFGRNRLI (SEQ ID NO: 97) |
| REVERSE | MSKIKINYEKYHIKPFPHFDQRIKVNKKVKENLQNPFYIAAHS |
| TRANSCRIPTASE | FYPFIHYKKISYKFKNGTLSSPKERDIFYSGHMDGYIYKHYGEI |
| BACILLUS SUBTILIS | LNHKYNNTCIGKGIDHVSLAYRNNKMGKSNIHFAAEVINFISE |
| RT | QQQAFIFVSDFSSYFDSLDHAILKEKLIEVLEEQDKLSKDWWN |
| REF SEQ. QBJ66766 | VFKHITRYNWVEKEEVISDLECTKEKIARDKKSRERYYTPAEF |
| | REFRKRVNIKSNDTGVGIPQGTAISAVLANVYAIDLDQKLNQY |
| | ALKYGGIYRRYSDDIIMVLPMTSDGQDPSNDHVSFIKSVVKRN |
| | KVTMGDSKTSVLYYANNNIYEDYQRKRESKMDYLGFSFDGM |
| | TVKIREKSLFKYYHRTYKKINSINWASVKKEKKVGRKKLYLL |
| | YSHLGRNYKGHGNFISYCKKAHAVFEGNKKIESLINQQIKRH |
| | WKKIQKRLVDV (SEQ ID NO: 98) |
| EUBACTERIUM | DTSNLMEQILSSDNLNRAYLQVVRNKGAEGVDGMKYTELKE |
| RECTALE GROUP II | HLAKNGETIKGQLRTRKYKPQPARRVEIPKPDGGVRNLGVPT |
| INTRON RT | VTDRFIQQAIAQVLTPIYEEQFHDHSYGFRPNRCAQQAILTALN |
| | IMNDGNDWIVDIDLEKFFDTVNHDKLMTLIGRTIKDGDVISIV |
| | RKYLVSGIMIDDEYEDSIVGTPQGGNLSPLLANIMLNELDKEM |
| | EKRGLNFVRYADDCIIMVGSEMSANRVMRNISRFIEEKLGLKV |
| | NMTKSKVDRPSGLKYLGFGFYFDPRAHQFKAKPHAKSVAKF |
| | KKRMKELTCRSWGVSNSYKVEKLNQLIRGWINYFKIGSMKTL |
| | CKELDSRIRYRLRMCIWKQWKTPQNQEKNLVKLGIDRNTARR |
| | VAYTGKRIAYVCNKGAVNVAISNKRLASFGLISMLDYYIEKCV |
| | TC (SEQ ID NO: 99) |
| GEOBACILLUS | ALLERILARDNLITALKRVEANQGAPGIDGVSTDQLRDYIRAH |
| STEAROTHERMOPHILUS | WSTIHAQLLAGTYRPAPVRRVEIPKPGGGTRQLGIPTVVDRLIQ |
| GROUP II | QAILQELTPIFDPDFSSSSFGFRPGRNAHDAVRQAQGYIQEGYR |
| INTRON RT | YVVDMDLEKFFDRVNHDILMSRVARKVKDKRVLKLIRAYLQA |
| | GVMIEGVKVQTEEGTPQGGPLSPLLANILLDDLDKELEKRGL |
| | KFCRYADDCNIYVKSLRAGQRVKQSIQRFLEKTLKLKVNEEKS |
| | AVDRPWKRAFLGFSFTPERKARIRLAPRSIQRLKQRIRQLTNPN |
| | WSISMPERIHRVNQYVMGWIGYFRLVETPSVLQTIEGWIRRRL |
| | RLCQWLQWKRVRTRIRELRALGLKETAVMEIANTRKGAWRTT |
| | KTPQLHQALGKTYWTAQGLKSLTQR (SEQ ID NO: 100) |

### Variant and Error-Prone RTs

[0454] Reverse transcriptases are essential for synthesizing complementary DNA (cDNA) strands from RNA templates. Reverse transcriptases are enzymes composed of distinct domains that exhibit different biochemical activities. The enzymes catalyze the synthesis of DNA from an RNA template, as follows: In the presence of an annealed primer, reverse transcriptase binds to an RNA template and initiates the polymerization reaction. RNA-dependent DNA polymerase activity synthesizes the complementary DNA (cDNA) strand, incorporating dNTPs. RNase H activity degrades the RNA template of the DNA:RNA complex. Thus, reverse transcriptases comprise (a) a binding activity that recognizes and binds to a RNA/DNA hybrid, (b) an RNA-dependent DNA polymerase activity, and (c) an RNase H activity. In addition, reverse transcriptases generally are regarded as having various attributes, including their thermostability, processivity (rate of dNTP incorporation), and fidelity (or error-rate). The reverse transcriptase variants contemplated herein may include any mutations to reverse transcriptase that impacts or changes any one or more of these enzymatic activities (e.g., RNA-dependent DNA polymerase activity, RNase H activity, or DNA/RNA hybrid-binding activity) or enzyme properties (e.g., thermostability, processivity, or fidelity). Such variants may be available in the art in the public domain, available commercially, or may be made using known methods of mutagenesis, including directed evolutionary processes (e.g., PACE or PANCE).

[0455] In various embodiments, the reverse transcriptase may be a variant reverse transcriptase. As used herein, a “variant reverse transcriptase” includes any naturally occurring or genetically engineered variant comprising one or more mutations (including singular mutations, inversions, deletions, insertions, and rearrangements) relative to a reference sequences (e.g., a reference wild type sequence). RT naturally have several activities, including an RNA-dependent DNA polymerase activity, ribonuclease H activity, and DNA-dependent DNA polymerase activity. Collectively, these activities enable the enzyme to convert single-stranded RNA into double-stranded cDNA. In retroviruses and retrotransposons, this cDNA can then integrate into the host genome, from which new RNA copies can be made via host-cell transcription. Variant RT's may comprise a mutation which impacts one or more of these activities (either which reduces or increases these activities, or which eliminates these activities all together). In addition, variant RTs may comprise one or more mutations which render the RT more or less stable, less prone to aggregration, and facilitates purification and/or detection, and/or other the modification of properties or characteristics.

[0456] A person of ordinary skill in the art will recognize that variant reverse transcriptases derived from other reverse transcriptases, including but not limited to Moloney Murine Leukemia Virus (M-MLV); Human Immunodeficiency Virus (HIV) reverse transcriptase and avian Sarcoma-Leukosis Virus (ASLV) reverse transcriptase, which includes but is not limited to Rous Sarcoma Virus (RSV) reverse transcriptase, Avian Myeloblastosis Virus (AMV) reverse transcriptase, Avian Erythroblastosis Virus (AEV) Helper Virus MCAV reverse transcriptase, Avian Myelocytomatosis Virus MC29 Helper Virus MCAV reverse transcriptase, Avian Reticuloendotheliosis Virus (REV-T) Helper Virus REV-A reverse transcriptase, Avian Sarcoma Virus UR2 Helper Virus UR2AV reverse transcriptase, Avian Sarcoma Virus Y73 Helper Virus YAV reverse transcriptase, Rous Associated Virus (RAV) reverse transcriptase, and Myeloblastosis Associated Virus (MAV) reverse transcriptase may be suitably used in the subject methods and composition described herein.

[0457] One method of preparing variant RTs is by genetic modification (e.g., by modifying the DNA sequence of a wild-type reverse transcriptase). A number of methods are known in the art that permit the random as well as targeted mutation of DNA sequences (see for example, Ausubel et. al. Short Protocols in Molecular Biology (1995) 3.sup.rd Ed. John Wiley & Sons, Inc.). In addition, there are a number of commercially available kits for site-directed mutagenesis, including both conventional and PCR-based methods. Examples include the QuikChange Site-Directed Mutagenesis Kits (AGILENT®), the Q5® Site-Directed Mutagenesis Kit (NEW ENGLAND BIOLABS®), and GeneArt™ Site-Directed Mutagenesis System (THERMOFISHER SCIENTIFIC®).

[0458] In addition, mutant reverse transcriptases may be generated by insertional mutation or truncation (N-terminal, internal, or C-terminal insertions or truncations) according to methodologies known to one skilled in the art. The term “mutation,” as used herein, refers to a substitution of a residue within a sequence, e.g., a nucleic acid or amino acid sequence, with another residue, or a deletion or insertion of one or more residues within a sequence. Mutations are typically described herein by identifying the original residue followed by the position of the residue within the sequence and by the identity of the newly substituted residue. Various methods for making the amino acid substitutions (mutations) provided herein are well known in the art, and are provided by, for example, Green and Sambrook, Molecular Cloning: A Laboratory Manual (4th ed., Cold Spring Harbor Laboratory Press, Cold Spring Harbor, N.Y. (2012)). Mutations can include a variety of categories, such as single base polymorphisms, microduplication regions, indel, and inversions, and is not meant to be limiting in any way. Mutations can include “loss-of-function” mutations which is the normal result of a mutation that reduces or abolishes a protein activity. Most loss-of-function mutations are recessive, because in a heterozygote the second chromosome copy carries an unmutated version of the gene coding for a fully functional protein whose presence compensates for the effect of the mutation. Mutations also embrace “gain-of-function” mutations, which is one which confers an abnormal activity on a protein or cell that is otherwise not present in a normal condition. Many gain-of-function mutations are in regulatory sequences rather than in coding regions, and can therefore have a number of consequences. For example, a mutation might lead to one or more genes being expressed in the wrong tissues, these tissues gaining functions that they normally lack. Because of their nature, gain-of-function mutations are usually dominant.

[0459] Older methods of site-directed mutagenesis known in the art rely on sub-cloning of the sequence to be mutated into a vector, such as an M13 bacteriophage vector, that allows the isolation of single-stranded DNA template. In these methods, one anneals a mutagenic primer (i.e., a primer capable of annealing to the site to be mutated but bearing one or more mismatched nucleotides at the site to be mutated) to the single-stranded template and then polymerizes the complement of the template starting from the 3′ end of the mutagenic primer. The resulting duplexes are then transformed into host bacteria and plaques are screened for the desired mutation.

[0460] More recently, site-directed mutagenesis has employed PCR methodologies, which have the advantage of not requiring a single-stranded template. In addition, methods have been developed that do not require sub-cloning. Several issues must be considered when PCR-based site-directed mutagenesis is performed. First, in these methods it is desirable to reduce the number of PCR cycles to prevent expansion of undesired mutations introduced by the polymerase. Second, a selection must be employed in order to reduce the number of non-mutated parental molecules persisting in the reaction. Third, an extended-length PCR method is preferred in order to allow the use of a single PCR primer set. And fourth, because of the non-template-dependent terminal extension activity of some thermostable polymerases it is often necessary to incorporate an end-polishing step into the procedure prior to blunt-end ligation of the PCR-generated mutant product.

[0461] Methods of random mutagenesis, which will result in a panel of mutants bearing one or more randomly situated mutations, exist in the art. Such a panel of mutants may then be screened for those exhibiting the desired properties, for example, increased stability, relative to a wild-type reverse transcriptase.

[0462] An example of a method for random mutagenesis is the so-called “error-prone PCR method.” As the name implies, the method amplifies a given sequence under conditions in which the DNA polymerase does not support high fidelity incorporation. Although the conditions encouraging error-prone incorporation for different DNA polymerases vary, one skilled in the art may determine such conditions for a given enzyme. A key variable for many DNA polymerases in the fidelity of amplification is, for example, the type and concentration of divalent metal ion in the buffer. The use of manganese ion and/or variation of the magnesium or manganese ion concentration may therefore be applied to influence the error rate of the polymerase.

[0463] In various aspects, the RT of the prime editors may be an “error-prone” reverse transcriptase variant. Error-prone reverse transcriptases that are known and/or available in the art may be used. It will be appreciated that reverse transcriptases naturally do not have any proofreading function; thus the error rate of reverse transcriptase is generally higher than DNA polymerases comprising a proofreading activity. The error-rate of any particular reverse transcriptase is a property of the enzyme's “fidelity,” which represents the accuracy of template-directed polymerization of DNA against its RNA template. An RT with high fidelity has a low-error rate. Conversely, an RT with low fidelity has a high-error rate. The fidelity of M-MLV-based reverse transcriptases are reported to have an error rate in the range of one error in 15,000 to 27,000 nucleotides synthesized. See Boutabout et al., “DNA synthesis fidelity by the reverse transcriptase of the yeast retrotransposon Ty1,” Nucleic Acids Res, 2001, 29: 2217-2222, which is incorporated by reference. Thus, for purposes of this application, those reverse transcriptases considered to be “error-prone” or which are considered to have an “error-prone fidelity” are those having an error rate that is less than one error in 15,000 nucleotides synthesized.

[0464] Error-prone reverse transcriptase also may be created through mutagenesis of a starting RT enzyme (e.g., a wild type M-MLV RT). The method of mutagenesis is not limited and may include directed evolution processes, such as phage-assisted continuous evolution (PACE) or phage-assisted noncontinuous evolution (PANCE). The term “phage-assisted continuous evolution (PACE),” as used herein, refers to continuous evolution that employs phage as viral vectors. The general concept of PACE technology has been described, for example, in International PCT Application, PCT/US2009/056194, filed Sep. 8, 2009, published as WO 2010/028347 on Mar. 11, 2010; International PCT Application, PCT/US2011/066747, filed Dec. 22, 2011, published as WO 2012/088381 on Jun. 28, 2012; U.S. Application, U.S. Pat. No. 9,023,594, issued May 5, 2015, International PCT Application, PCT/US2015/012022, filed Jan. 20, 2015, published as WO 2015/134121 on Sep. 11, 2015, and International PCT Application, PCT/US2016/027795, filed Apr. 15, 2016, published as WO 2016/168631 on Oct. 20, 2016, the entire contents of each of which are incorporated herein by reference.

[0465] Error-prone reverse transcriptases may also be obtain by phage-assisted non-continuous evolution (PANCE),” which as used herein, refers to non-continuous evolution that employs phage as viral vectors. PANCE is a simplified technique for rapid in vivo directed evolution using serial flask transfers of evolving ‘selection phage’ (SP), which contain a gene of interest to be evolved, across fresh E. coli host cells, thereby allowing genes inside the host E. coli to be held constant while genes contained in the SP continuously evolve. Serial flask transfers have long served as a widely-accessible approach for laboratory evolution of microbes, and, more recently, analogous approaches have been developed for bacteriophage evolution. The PANCE system features lower stringency than the PACE system.

[0466] Other error-prone reverse transcriptases have been described in the literature, each of which are contemplated for use in the herein methods and compositions. For example, error-prone reverse transcriptases have been described in Bebenek et al., “Error-prone Polymerization by HIV-1 Reverse Transcriptase,” J Biol Chem, 1993, Vol. 268: 10324-10334 and Sebastian-Martin et al., “Transcriptional inaccuracy threshold attenuates differences in RNA-dependent DNA synthesis fidelity between retroviral reverse transcriptases,” Scientific Reports, 2018, Vol. 8: 627, each of which are incorporated by reference. Still further, reverse transcriptases, including error-prone reverse transcriptases can be obtained from a commercial supplier, including ProtoScript® (II) Reverse Transcriptase, AMV Reverse Transcriptase, WarmStart® Reverse Transcriptase, and M-MuLV Reverse Transcriptase, all from NEW ENGLAND BIOLABS®), or AMV Reverse Transcriptase XL, SMARTScribe Reverse Transcriptase, GPR ultra-pure MMLV Reverse Transcriptase, all from TAKARA BIO USA, INC. (formerly CLONTECH).

[0467] The herein disclosure also contemplates reverse transcriptases having mutations in RNaseH domain. As mentioned above, one of the intrinsic properties of reverse transcriptases is the RNase H activity, which cleaves the RNA template of the RNA:cDNA hybrid concurrently with polymerization. The RNase H activity can be undesirable for synthesis of long cDNAs because the RNA template may be degraded before completion of full-length reverse transcription. The RNase H activity may also lower reverse transcription efficiency, presumably due to its competition with the polymerase activity of the enzyme. Thus, the present disclosure contemplates any reverse transcriptase variants that comprise a modified RNaseH activity.

[0468] The herein disclosure also contemplates reverse transcriptases having mutations in the RNA-dependent DNA polymerase domain. As mentioned above, one of the intrinsic properties of reverse transcriptases is the RNA-dependent DNA polymerase activity, which incorporates the nucleobases into the nascent cDNA strand as coded by the template RNA strand of the RNA:cDNA hybrid. The RNA-dependent DNA polymerase activity can be increased or decreased (i.e., in terms of its rate of incorporation) to either increase or decrease the processivity of the enzyme. Thus, the present disclosure contemplates any reverse transcriptase variants that comprise a modified RNA-dependent DNA polymerase activity such that the processivity of the enzyme of either increased or decreased relative to an unmodified version.

[0469] Also contemplated herein are reverse transcriptase variants that have altered thermostability characteristics. The ability of a reverse transcriptase to withstand high temperatures is an important aspect of cDNA synthesis. Elevated reaction temperatures help denature RNA with strong secondary structures and/or high GC content, allowing reverse transcriptases to read through the sequence. As a result, reverse transcription at higher temperatures enables full-length cDNA synthesis and higher yields, which can lead to an improved generation of the 3′ flap ssDNA as a result of the prime editing process. Wild type M-MLV reverse transcriptase typically has an optimal temperature in the range of 37-48° C.; however, mutations may be introduced that allow for the reverse transcription activity at higher temperatures of over 48° C., including 49° C., 50° C., 51° C., 52° C., 53° C., 54° C., 55° C., 56° C., 57° C., 58° C., 59° C., 60° C., 61° C., 62° C., 63° C., 64° C., 65° C., 66° C., and higher.

[0470] The variant reverse transcriptases contemplated herein, including error-prone RTs, thermostable RTs, increase-processivity RTs, can be engineered by various routine strategies, including mutagenesis or evolutionary processes. In some cases, the variants can be produced by introducing a single mutation. In other cases, the variants may require more than one mutation. For those mutants comprising more than one mutation, the effect of a given mutation may be evaluated by introduction of the identified mutation to the wild-type gene by site-directed mutagenesis in isolation from the other mutations borne by the particular mutant. Screening assays of the single mutant thus produced will then allow the determination of the effect of that mutation alone.

[0471] Variant RT enzymes used herein may also include other “RT variants” having at least about 70% identical, at least about 80% identical, at least about 90% identical, at least about 95% identical, at least about 96% identical, at least about 97% identical, at least about 98% identical, at least about 99% identical, at least about 99.5% identical, or at least about 99.9% identical to any reference RT protein, including any wild type RT, or mutant RT, or fragment RT, or other variant of RT disclosed or contemplated herein or known in the art.

[0472] In some embodiments, an RT variant may have 1, 2, 3, 4, 5, 6, 7, 8, 9, 10, 11, 12, 13, 14, 15, 16, 17, 18, 19, 20, 21, 22, 21, 24, 25, 26, 27, 28, 29, 30, 31, 32, 33, 34, 35, 36, 37, 38, 39, 40, 41, 42, 43, 44, 45, 46, 47, 48, 49, 50, or up to 100, or up to 200, or up to 300, or up to 400, or up to 500 or more amino acid changes compared to a reference RT. In some embodiments, the RT variant comprises a fragment of a reference RT, such that the fragment is at least about 70% identical, at least about 80% identical, at least about 90% identical, at least about 95% identical, at least about 96% identical, at least about 97% identical, at least about 98% identical, at least about 99% identical, at least about 99.5% identical, or at least about 99.9% identical to the corresponding fragment of the reference RT. In some embodiments, the fragment is is at least 30%, at least 35%, at least 40%, at least 45%, at least 50%, at least 55%, at least 60%, at least 65%, at least 70%, at least 75%, at least 80%, at least 85%, at least 90%, at least 95% identical, at least 96%, at least 97%, at least 98%, at least 99%, or at least 99.5% of the amino acid length of a corresponding wild type RT (M-MLV reverse transcriptase) (e.g., SEQ ID NO: 89) or to any of the reverse transcriptases of SEQ ID NOs: 90-100.

[0473] In some embodiments, the disclosure also may utilize RT fragments which retain their functionality and which are fragments of any herein disclosed RT proteins. In some embodiments, the RT fragment is at least 100 amino acids in length. In some embodiments, the fragment is at least 100, 150, 200, 250, 300, 350, 400, 450, 500, 550, or up to 600 or more amino acids in length.

[0474] In still other embodiments, the disclosure also may utilize RT variants which are truncated at the N-terminus or the C-terminus, or both, by a certain number of amino acids which results in a truncated variant which still retains sufficient polymerase function. In some embodiments, the RT truncated variant has a truncation of at least 1, at least 2, at least 3, at least 4, at least 5, at least 6, at least 7, at least 8, at least 9, at least 10, at least 11, at least 12, at least 13, at least 14, at least 15, at least 16, at least 17, at least 18, at least 19, at least 20, at least 21, at least 22, at least 23, at least 24, at least 25, at least 30, 40, 50, 60, 70, 80, 90, 100, 110, 120, 130, 140, 150, 160, 170, 180, 190, 200, 210, 220, 230, 240, or 250 amino acids at the N-terminal end of the protein. In other embodiments, the RT truncated variant has a truncation of at least 1, at least 2, at least 3, at least 4, at least 5, at least 6, at least 7, at least 8, at least 9, at least 10, at least 11, at least 12, at least 13, at least 14, at least 15, at least 16, at least 17, at least 18, at least 19, at least 20, at least 21, at least 22, at least 23, at least 24, at least 25, at least 30, 40, 50, 60, 70, 80, 90, 100, 110, 120, 130, 140, 150, 160, 170, 180, 190, 200, 210, 220, 230, 240, or 250 amino acids at the C-terminal end of the protein. In still other embodiments, the RT truncated variant has a trunction at the N-terminal and the C-terminal end which are the same or different lengths.

[0475] For example, the prime editors disclosed herein may include a truncated version of M-MLV reverse transcriptase. In this embodiment, the reverse transcriptase contains 4 mutations (D200N, T306K, W313F, T330P; noting that the L603W mutation present in PE2 is no longer present due to the truncation). The DNA sequence encoding this truncated editor is 522 bp smaller than PE2, and therefore makes its potentially useful for applications where delivery of the DNA sequence is challenging due to its size (i.e., adeno-associated virus and lentivirus delivery). This embodiment is referred to as MMLV-RT(trunc) and has the following amino acid sequence:

MMLV-RT(TRUNC)
(SEQ ID NO: 76)
TLNIEDEYRLHETSKEPDVSLGSTWLSDFPQAWAETGGMGLAVRQAPLII
PLKATSTPVSIKQYPMSQEARLGIKPHIQRLLDQGILVPCQSPWNTPLLP
VKKPGTNDYRPVQDLREVNKRVEDIHPTVPNPYNLLSGLPPSHQWYTVLD
LKDAFFCLRLHPTSQPLFAFEWRDPEMGISGQLTWTRLPQGFKNSPTLFN
EALHRDLADFRIQHPDLILLQYVDDLLLAATSELDCQQGTRALLQTLGNL
GYRASAKKAQICQKQVKYLGYLLKEGQRWLTEARKETVMGQPTPKTPRQL
REFLGKAGFCRLFIPGFAEMAAPLYPLTKPGTLFNWGPDQQKAYQEIKQA
LLTAPALGLPDLTKPFELFVDEKQGYAKGVLTQKLGPWRRPVAYLSKKLD
PVAAGWPPCLRMVAAIAVLTKDAGKLTMGQPLVILAPHAVEALVKQPPDR
WLSNARMTHYQALLLDTDRVQFGPVVALNPATLLPLPEEGLQHNCLDNSR
LIN

[0476] In various embodiments, the prime editors disclosed herein may comprise one of the RT variants described herein, or a RT variant thereof having at least about 70% identical, at least about 80% identical, at least about 90% identical, at least about 95% identical, at least about 96% identical, at least about 97% identical, at least about 98% identical, at least about 99% identical, at least about 99.5% identical, or at least about 99.9% identical to any reference Cas9 variants.

[0477] In still other embodiments, the present methods and compositions may utilize a DNA polymerase that has been evolved into a reverse transcriptase, as described in Effefson et al., “Synthetic evolutionary origin of a proofreading reverse transcriptase,” Science, Jun. 24, 2016, Vol. 352: 1590-1593, the contents of which are incorporated herein by reference.

[0478] In certain other embodiments, the reverse transcriptase is provided as a component of a fusion protein also comprising a napDNAbp. In other words, in some embodiments, the reverse transcriptase is fused to a napDNAbp as a fusion protein.

[0479] In various embodiments, variant reverse transcriptases can be engineered from wild type M-MLV reverse transcriptase as represented by SEQ ID NO: 89.

[0480] In various embodiments, the prime editors described herein (with RT provided as either a fusion partner or in trans) can include a variant RT comprising one or more of the following mutations: P51L, S67K, E69K, L139P, T197A, D200N, H204R, F209N, E302K, E302R, T306K, F309N, W313F, T330P, L345G, L435G, N454K, D524G, E562Q, D583N, H594Q, L603W, E607K, or D653N in the wild type M-MLV RT of SEQ ID NO: 89 or at a corresponding amino acid position in another wild type RT polypeptide sequence.

[0481] Some exemplary reverse transcriptases that can be fused to napDNAbp proteins or provided as individual proteins according to various embodiments of this disclosure are provided below. Exemplary reverse transcriptases include variants with at least 80%, at least 85%, at least 90%, at least 95%, or at least 99% sequence identity to the following wild-type enzymes or partial enzymes:

| Description | Sequence (variant substitutions relative to wild type) |
|---|---|
| Reverse | TLNIEDEYRLHETSKEPDVSLGSTWLSDFPQAWAETGGMGLAVRQAP |
| transcriptase | LIIPLKATSTPVSIKQYPMSQEARLGIKPHIQRLLDQGILVPCQSPWNTPL |
| (M-MLV RT) | LPVKKPGTNDYRPVQDLREVNKRVEDIHPTVPNPYNLLSGLPPSHQWY |
| wild type | TVLDLKDAFFCLRLHPTSQPLFAFEWRDPEMGISGQLTWTRLPQGFKN |
| moloney | SPTLFDEALHRDLADFRIQHPDLILLQYVDDLLLAATSELDCQQGTRAL |
| murine | LQTLGNLGYRASAKKAQICQKQVKYLGYLLKEGQRWLTEARKETVM |
| leukemia | GQPTPKTPRQLREFLGTAGFCRLWIPGFAEMAAPLYPLTKTGTLFNWG |
| virus | PDQQKAYQEIKQALLTAPALGLPDLTKPFELFVDEKQGYAKGVLTQKL |
| Used in PE1 | GPWRRPVAYLSKKLDPVAAGWPPCLRMVAAIAVLTKDAGKLTMGQP |
| (prime editor | LVILAPHAVEALVKQPPDRWLSNARMTHYQALLLDTDRVQFGPVVAL |
| 1 fusion | NPATLLPLPEEGLQHNCLDILAEAHGTRPDLTDQPLPDADHTWYTDGS |
| protein | SLLQEGQRKAGAAVTTETEVIWAKALPAGTSAQRAELIALTQALKMA |
| disclosed | EGKKLNVYTDSRYAFATAHIHGEIYRRRGLLTSEGKEIKNKDEILALLK |
| herein) | ALFLPKRLSIIHCPGHQKGHSAEARGNRMADQAARKAAITETPDTSTLL |
| | IENSSP (SEQ ID NO: 89) |
| M-MLV RT | TLNIEDEYRLHETSKEPDVSLGSTWLSDFPQAWAETGGMGLAVRQAP |
| D200N | LIIPLKATSTPVSIKQYPMSQEARLGIKPHIQRLLDQGILVPCQSPWNTPL |
| | LPVKKPGTNDYRPVQDLREVNKRVEDIHPTVPNPYNLLSGLPPSHQWY |
| | TVLDLKDAFFCLRLHPTSQPLFAFEWRDPEMGISGQLTWTRLPQGFKN |
| | SPTLFNEALHRDLADFRIQHPDLILLQYVDDLLLAATSELDCQQGTRAL |
| | LQTLGNLGYRASAKKAQICQKQVKYLGYLLKEGQRWLTEARKETVM |
| | GQPTPKTPRQLREFLGTAGFCRLWIPGFAEMAAPLYPLTKTGTLFNWG |
| | PDQQKAYQEIKQALLTAPALGLPDLTKPFELFVDEKQGYAKGVLTQKL |
| | GPWRRPVAYLSKKLDPVAAGWPPCLRMVAAIAVLTKDAGKLTMGQP |
| | LVILAPHAVEALVKQPPDRWLSNARMTHYQALLLDTDRVQFGPVVAL |
| | NPATLLPLPEEGLQHNCLDILAEAHGTRPDLTDQPLPDADHTWYTDGS |
| | SLLQEGQRKAGAAVTTETEVIWAKALPAGTSAQRAELIALTQALKMA |
| | EGKKLNVYTDSRYAFATAHIHGEIYRRRGLLTSEGKEIKNKDEILALLK |
| | ALFLPKRLSIIHCPGHQKGHSAEARGNRMADQAARKAAITETPDTSTLL |
| | IENSSP (SEQ ID NO: 701) |
| M-MLV RT | TLNIEDEYRLHETSKEPDVSLGSTWLSDFPQAWAETGGMGLAVRQAP |
| D200N | LIIPLKATSTPVSIKQYPMSQEARLGIKPHIQRLLDQGILVPCQSPWNTPL |
| T330P | LPVKKPGTNDYRPVQDLREVNKRVEDIHPTVPNPYNLLSGLPPSHQWY |
| | TVLDLKDAFFCLRLHPTSQPLFAFEWRDPEMGISGQLTWTRLPQGFKN |
| | SPTLFNEALHRDLADFRIQHPDLILLQYVDDLLLAATSELDCQQGTRAL |
| | LQTLGNLGYRASAKKAQICQKQVKYLGYLLKEGQRWLTEARKETVM |
| | GQPTPKTPRQLREFLGTAGFCRLWIPGFAEMAAPLYPLTKPGTLFNWG |
| | PDQQKAYQEIKQALLTAPALGLPDLTKPFELFVDEKQGYAKGVLTQKL |
| | GPWRRPVAYLSKKLDPVAAGWPPCLRMVAAIAVLTKDAGKLTMGQP |
| | LVILAPHAVEALVKQPPDRWLSNARMTHYQALLLDTDRVQFGPVVAL |
| | NPATLLPLPEEGLQHNCLDILAEAHGTRPDLTDQPLPDADHTWYTDGS |
| | SLLQEGQRKAGAAVTTETEVIWAKALPAGTSAQRAELIALTQALKMA |
| | EGKKLNVYTDSRYAFATAHIHGEIYRRRGLLTSEGKEIKNKDEILALLK |
| | ALFLPKRLSIIHCPGHQKGHSAEARGNRMADQAARKAAITETPDTSTLL |
| | IENSSP (SEQ ID NO: 702) |
| M-MLV RT | TLNIEDEYRLHETSKEPDVSLGSTWLSDFPQAWAETGGMGLAVRQAP |
| D200N | LIIPLKATSTPVSIKQYPMSQEARLGIKPHIQRLLDQGILVPCQSPWNTPL |
| T330P | LPVKKPGTNDYRPVQDLREVNKRVEDIHPTVPNPYNLLSGLPPSHQWY |
| L603W | TVLDLKDAFFCLRLHPTSQPLFAFEWRDPEMGISGQLTWTRLPQGFKN |
| | SPTLFNEALHRDLADFRIQHPDLILLQYVDDLLLAATSELDCQQGTRAL |
| | LQTLGNLGYRASAKKAQICQKQVKYLGYLLKEGQRWLTEARKETVM |
| | GQPTPKTPRQLREFLGTAGFCRLWIPGFAEMAAPLYPLTKPGTLFNWG |
| | PDQQKAYQEIKQALLTAPALGLPDLTKPFELFVDEKQGYAKGVLTQKL |
| | GPWRRPVAYLSKKLDPVAAGWPPCLRMVAAIAVLTKDAGKLTMGQP |
| | LVILAPHAVEALVKQPPDRWLSNARMTHYQALLLDTDRVQFGPVVAL |
| | NPATLLPLPEEGLQHNCLDILAEAHGTRPDLTDQPLPDADHTWYTDGS |
| | SLLQEGQRKAGAAVTTETEVIWAKALPAGTSAQRAELIALTQALKMA |
| | EGKKLNVYTDSRYAFATAHIHGEIYRRRGWLTSEGKEIKNKDEILALL |
| | KALFLPKRLSIIHCPGHQKGHSAEARGNRMADQAARKAAITETPDTST |
| | LLIENSSP (SEQ ID NO: 740) |
| M-MLV RT | TLNIEDEYRLHETSKEPDVSLGSTWLSDFPQAWAETGGMGLAVRQAP |
| D200N | LIIPLKATSTPVSIKQYPMSQKARLGIKPHIQRLLDQGILVPCQSPWNTP |
| T330P | LLPVKKPGTNDYRPVQDLREVNKRVEDIHPTVPNPYNLLSGLPPSHQW |
| L603W | YTVLDLKDAFFCLRLHPTSQPLFAFEWRDPEMGISGQLTWTRLPQGFK |
| E69K | NSPTLFNEALHRDLADFRIQHPDLILLQYVDDLLLAATSELDCQQGTRA |
| | LLQTLGNLGYRASAKKAQICQKQVKYLGYLLKEGQRWLTEARKETV |
| | MGQPTPKTPRQLREFLGTAGFCRLWIPGFAEMAAPLYPLTKPGTLFNW |
| | GPDQQKAYQEIKQALLTAPALGLPDLTKPFELFVDEKQGYAKGVLTQ |
| | KLGPWRRPVAYLSKKLDPVAAGWPPCLRMVAAIAVLTKDAGKLTMG |
| | QPLVILAPHAVEALVKQPPDRWLSNARMTHYQALLLDTDRVQFGPVV |
| | ALNPATLLPLPEEGLQHNCLDILAEAHGTRPDLTDQPLPDADHTWYTD |
| | GSSLLQEGQRKAGAAVTTETEVIWAKALPAGTSAQRAELIALTQALK |
| | MAEGKKLNVYTDSRYAFATAHIHGEIYRRRGWLTSEGKEIKNKDEILA |
| | LLKALFLPKRLSIIHCPGHQKGHSAEARGNRMADQAARKAAITETPDT |
| | STLLIENSSP (SEQ ID NO: 703) |
| M-MLV RT | TLNIEDEYRLHETSKEPDVSLGSTWLSDFPQAWAETGGMGLAVRQAP |
| D200N | LIIPLKATSTPVSIKQYPMSQEARLGIKPHIQRLLDQGILVPCQSPWNTPL |
| T330P | LPVKKPGTNDYRPVQDLREVNKRVEDIHPTVPNPYNLLSGLPPSHQWY |
| L603W | TVLDLKDAFFCLRLHPTSQPLFAFEWRDPEMGISGQLTWTRLPQGFKN |
| E302R | SPTLFNEALHRDLADFRIQHPDLILLQYVDDLLLAATSELDCQQGTRAL |
| | LQTLGNLGYRASAKKAQICQKQVKYLGYLLKEGQRWLTEARKETVM |
| | GQPTPKTPRQLRRFLGTAGFCRLWIPGFAEMAAPLYPLTKPGTLFNWG |
| | PDQQKAYQEIKQALLTAPALGLPDLTKPFELFVDEKQGYAKGVLTQKL |
| | GPWRRPVAYLSKKLDPVAAGWPPCLRMVAAIAVLTKDAGKLTMGQP |
| | LVILAPHAVEALVKQPPDRWLSNARMTHYQALLLDTDRVQFGPVVAL |
| | NPATLLPLPEEGLQHNCLDILAEAHGTRPDLTDQPLPDADHTWYTDGS |
| | SLLQEGQRKAGAAVTTETEVIWAKALPAGTSAQRAELIALTQALKMA |
| | EGKKLNVYTDSRYAFATAHIHGEIYRRRGWLTSEGKEIKNKDEILALL |
| | KALFLPKRLSIIHCPGHQKGHSAEARGNRMADQAARKAAITETPDTST |
| | LLIENSSP (SEQ ID NO: 704) |
| M-MLV RT | TLNIEDEYRLHETSKEPDVSLGSTWLSDFPQAWAETGGMGLAVRQAP |
| D200N | LIIPLKATSTPVSIKQYPMSQEARLGIKPHIQRLLDQGILVPCQSPWNTPL |
| T330P | LPVKKPGTNDYRPVQDLREVNKRVEDIHPTVPNPYNLLSGLPPSHQWY |
| L603W | TVLDLKDAFFCLRLHPTSQPLFAFEWRDPEMGISGQLTWTRLPQGFKN |
| E607K | SPTLFNEALHRDLADFRIQHPDLILLQYVDDLLLAATSELDCQQGTRAL |
| | LQTLGNLGYRASAKKAQICQKQVKYLGYLLKEGQRWLTEARKETVM |
| | GQPTPKTPRQLREFLGTAGFCRLWIPGFAEMAAPLYPLTKPGTLFNWG |
| | PDQQKAYQEIKQALLTAPALGLPDLTKPFELFVDEKQGYAKGVLTQKL |
| | GPWRRPVAYLSKKLDPVAAGWPPCLRMVAAIAVLTKDAGKLTMGQP |
| | LVILAPHAVEALVKQPPDRWLSNARMTHYQALLLDTDRVQFGPVVAL |
| | NPATLLPLPEEGLQHNCLDILAEAHGTRPDLTDQPLPDADHTWYTDGS |
| | SLLQEGQRKAGAAVTTETEVIWAKALPAGTSAQRAELIALTQALKMA |
| | EGKKLNVYTDSRYAFATAHIHGEIYRRRGWLTSKGKEIKNKDEILALL |
| | KALFLPKRLSIIHCPGHQKGHSAEARGNRMADQAARKAAITETPDTST |
| | LLIENSSP (SEQ ID NO: 705) |
| M-MLV RT | TLNIEDEYRLHETSKEPDVSLGSTWLSDFPQAWAETGGMGLAVRQAP |
| D200N | LIIPLKATSTPVSIKQYPMSQEARLGIKPHIQRLLDQGILVPCQSPWNTPL |
| T330P | LPVKKPGTNDYRPVQDLREVNKRVEDIHPTVPNPYNLLSGPPPSHQWY |
| L603W | TVLDLKDAFFCLRLHPTSQPLFAFEWRDPEMGISGQLTWTRLPQGFKN |
| L139P | SPTLFNEALHRDLADFRIQHPDLILLQYVDDLLLAATSELDCQQGTRAL |
| | LQTLGNLGYRASAKKAQICQKQVKYLGYLLKEGQRWLTEARKETVM |
| | GQPTPKTPRQLREFLGTAGFCRLWIPGFAEMAAPLYPLTKPGTLFNWG |
| | PDQQKAYQEIKQALLTAPALGLPDLTKPFELFVDEKQGYAKGVLTQKL |
| | GPWRRPVAYLSKKLDPVAAGWPPCLRMVAAIAVLTKDAGKLTMGQP |
| | LVILAPHAVEALVKQPPDRWLSNARMTHYQALLLDTDRVQFGPVVAL |
| | NPATLLPLPEEGLQHNCLDILAEAHGTRPDLTDQPLPDADHTWYTDGS |
| | SLLQEGQRKAGAAVTTETEVIWAKALPAGTSAQRAELIALTQALKMA |
| | EGKKLNVYTDSRYAFATAHIHGEIYRRRGWLTSEGKEIKNKDEILALL |
| | KALFLPKRLSIIHCPGHQKGHSAEARGNRMADQAARKAAITETPDTST |
| | LLIENSSP (SEQ ID NO: 706) |
| M-MLV RT | TLNIEDEYRLHETSKEPDVSLGSTWLSDFPQAWAETGGMGLAVRQAP |
| D200N | LIIPLKATSTPVSIKQYPMSQEARLGIKPHIQRLLDQGILVPCQSPWNTPL |
| T330P | LPVKKPGTNDYRPVQDLREVNKRVEDIHPTVPNPYNLLSGLPPSHQWY |
| L603W | TVLDLKDAFFCLRLHPTSQPLFAFEWRDPEMGISGQLTWTRLPQGFKN |
| L435G | SPTLFNEALHRDLADFRIQHPDLILLQYVDDLLLAATSELDCQQGTRAL |
| | LQTLGNLGYRASAKKAQICQKQVKYLGYLLKEGQRWLTEARKETVM |
| | GQPTPKTPRQLREFLGTAGFCRLWIPGFAEMAAPLYPLTKPGTLFNWG |
| | PDQQKAYQEIKQALLTAPALGLPDLTKPFELFVDEKQGYAKGVLTQKL |
| | GPWRRPVAYLSKKLDPVAAGWPPCLRMVAAIAVLTKDAGKLTMGQP |
| | LVIGAPHAVEALVKQPPDRWLSNARMTHYQALLLDTDRVQFGPVVAL |
| | NPATLLPLPEEGLQHNCLDILAEAHGTRPDLTDQPLPDADHTWYTDGS |
| | SLLQEGQRKAGAAVTTETEVIWAKALPAGTSAQRAELIALTQALKMA |
| | EGKKLNVYTDSRYAFATAHIHGEIYRRRGWLTSEGKEIKNKDEILALL |
| | KALFLPKRLSIIHCPGHQKGHSAEARGNRMADQAARKAAITETPDTST |
| | LLIENSSP (SEQ ID NO: 707) |
| M-MLV RT | TLNIEDEYRLHETSKEPDVSLGSTWLSDFPQAWAETGGMGLAVRQAP |
| D200N | LIIPLKATSTPVSIKQYPMSQEARLGIKPHIQRLLDQGILVPCQSPWNTPL |
| T330P | LPVKKPGTNDYRPVQDLREVNKRVEDIHPTVPNPYNLLSGLPPSHQWY |
| L603W | TVLDLKDAFFCLRLHPTSQPLFAFEWRDPEMGISGQLTWTRLPQGFKN |
| N454K | SPTLFNEALHRDLADFRIQHPDLILLQYVDDLLLAATSELDCQQGTRAL |
| | LQTLGNLGYRASAKKAQICQKQVKYLGYLLKEGQRWLTEARKETVM |
| | GQPTPKTPRQLREFLGTAGFCRLWIPGFAEMAAPLYPLTKPGTLFNWG |
| | PDQQKAYQEIKQALLTAPALGLPDLTKPFELFVDEKQGYAKGVLTQKL |
| | GPWRRPVAYLSKKLDPVAAGWPPCLRMVAAIAVLTKDAGKLTMGQP |
| | LVILAPHAVEALVKQPPDRWLSKARMTHYQALLLDTDRVQFGPVVAL |
| | NPATLLPLPEEGLQHNCLDILAEAHGTRPDLTDQPLPDADHTWYTDGS |
| | SLLQEGQRKAGAAVTTETEVIWAKALPAGTSAQRAELIALTQALKMA |
| | EGKKLNVYTDSRYAFATAHIHGEIYRRRGWLTSEGKEIKNKDEILALL |
| | KALFLPKRLSIIHCPGHQKGHSAEARGNRMADQAARKAAITETPDTST |
| | LLIENSSP (SEQ ID NO: 708) |
| M-MLV RT | TLNIEDEYRLHETSKEPDVSLGSTWLSDFPQAWAETGGMGLAVRQAP |
| D200N | LIIPLKATSTPVSIKQYPMSQEARLGIKPHIQRLLDQGILVPCQSPWNTPL |
| T330P | LPVKKPGTNDYRPVQDLREVNKRVEDIHPTVPNPYNLLSGLPPSHQWY |
| L603W | TVLDLKDAFFCLRLHPTSQPLFAFEWRDPEMGISGQLTWTRLPQGFKN |
| T306K | SPTLFNEALHRDLADFRIQHPDLILLQYVDDLLLAATSELDCQQGTRAL |
| | LQTLGNLGYRASAKKAQICQKQVKYLGYLLKEGQRWLTEARKETVM |
| | GQPTPKTPRQLREFLGKAGFCRLWIPGFAEMAAPLYPLTKPGTLFNWG |
| | PDQQKAYQEIKQALLTAPALGLPDLTKPFELFVDEKQGYAKGVLTQKL |
| | GPWRRPVAYLSKKLDPVAAGWPPCLRMVAAIAVLTKDAGKLTMGQP |
| | LVILAPHAVEALVKQPPDRWLSNARMTHYQALLLDTDRVQFGPVVAL |
| | NPATLLPLPEEGLQHNCLDILAEAHGTRPDLTDQPLPDADHTWYTDGS |
| | SLLQEGQRKAGAAVTTETEVIWAKALPAGTSAQRAELIALTQALKMA |
| | EGKKLNVYTDSRYAFATAHIHGEIYRRRGWLTSEGKEIKNKDEILALL |
| | KALFLPKRLSIIHCPGHQKGHSAEARGNRMADQAARKAAITETPDTST |
| | LLIENSSP (SEQ ID NO: 709) |
| M-MLV RT | TLNIEDEYRLHETSKEPDVSLGSTWLSDFPQAWAETGGMGLAVRQAP |
| D200N | LIIPLKATSTPVSIKQYPMSQEARLGIKPHIQRLLDQGILVPCQSPWNTPL |
| T330P | LPVKKPGTNDYRPVQDLREVNKRVEDIHPTVPNPYNLLSGLPPSHQWY |
| L603W | TVLDLKDAFFCLRLHPTSQPLFAFEWRDPEMGISGQLTWTRLPQGFKN |
| W313F | SPTLFNEALHRDLADFRIQHPDLILLQYVDDLLLAATSELDCQQGTRAL |
| | LQTLGNLGYRASAKKAQICQKQVKYLGYLLKEGQRWLTEARKETVM |
| | GQPTPKTPRQLREFLGTAGFCRLFIPGFAEMAAPLYPLTKPGTLFNWGP |
| | DQQKAYQEIKQALLTAPALGLPDLTKPFELFVDEKQGYAKGVLTQKL |
| | GPWRRPVAYLSKKLDPVAAGWPPCLRMVAAIAVLTKDAGKLTMGQP |
| | LVILAPHAVEALVKQPPDRWLSNARMTHYQALLLDTDRVQFGPVVAL |
| | NPATLLPLPEEGLQHNCLDILAEAHGTRPDLTDQPLPDADHTWYTDGS |
| | SLLQEGQRKAGAAVTTETEVIWAKALPAGTSAQRAELIALTQALKMA |
| | EGKKLNVYTDSRYAFATAHIHGEIYRRRGWLTSEGKEIKNKDEILALL |
| | KALFLPKRLSIIHCPGHQKGHSAEARGNRMADQAARKAAITETPDTST |
| | LLIENSSP (SEQ ID NO: 710) |
| M-MLV RT | TLNIEDEYRLHETSKEPDVSLGSTWLSDFPQAWAETGGMGLAVRQAP |
| D200N | LIIPLKATSTPVSIKQYPMSQEARLGIKPHIQRLLDQGILVPCQSPWNTPL |
| T330P | LPVKKPGTNDYRPVQDLREVNKRVEDIHPTVPNPYNLLSGLPPSHQWY |
| L603W | TVLDLKDAFFCLRLHPTSQPLFAFEWRDPEMGISGQLTWTRLPQGFKN |
| D524G | SPTLFNEALHRDLADFRIQHPDLILLQYVDDLLLAATSELDCQQGTRAL |
| E562Q | LQTLGNLGYRASAKKAQICQKQVKYLGYLLKEGQRWLTEARKETVM |
| D583N | GQPTPKTPRQLREFLGTAGFCRLWIPGFAEMAAPLYPLTKPGTLFNWG |
| | PDQQKAYQEIKQALLTAPALGLPDLTKPFELFVDEKQGYAKGVLTQKL |
| | GPWRRPVAYLSKKLDPVAAGWPPCLRMVAAIAVLTKDAGKLTMGQP |
| | LVILAPHAVEALVKQPPDRWLSNARMTHYQALLLDTDRVQFGPVVAL |
| | NPATLLPLPEEGLQHNCLDILAEAHGTRPDLTDQPLPDADHTWYTGGS |
| | SLLQEGQRKAGAAVTTETEVIWAKALPAGTSAQRAQLIALTQALKMA |
| | EGKKLNVYTNSRYAFATAHIHGEIYRRRGWLTSEGKEIKNKDEILALL |
| | KALFLPKRLSIIHCPGHQKGHSAEARGNRMADQAARKAAITETPDTST |
| | LLIENSSP (SEQ ID NO: 711) |
| M-MLV RT | TLNIEDEYRLHETSKEPDVSLGSTWLSDFPQAWAETGGMGLAVRQAP |
| D200N | LIIPLKATSTPVSIKQYPMSQEARLGIKPHIQRLLDQGILVPCQSPWNTPL |
| T330P | LPVKKPGTNDYRPVQDLREVNKRVEDIHPTVPNPYNLLSGLPPSHQWY |
| L603W | TVLDLKDAFFCLRLHPTSQPLFAFEWRDPEMGISGQLTWTRLPQGFKN |
| E302R | SPTLFNEALHRDLADFRIQHPDLILLQYVDDLLLAATSELDCQQGTRAL |
| W313F | LQTLGNLGYRASAKKAQICQKQVKYLGYLLKEGQRWLTEARKETVM |
| | GQPTPKTPRQLRRFLGTAGFCRLFIPGFAEMAAPLYPLTKPGTLFNWG |
| | PDQQKAYQEIKQALLTAPALGLPDLTKPFELFVDEKQGYAKGVLTQKL |
| | GPWRRPVAYLSKKLDPVAAGWPPCLRMVAAIAVLTKDAGKLTMGQP |
| | LVILAPHAVEALVKQPPDRWLSNARMTHYQALLLDTDRVQFGPVVAL |
| | NPATLLPLPEEGLQHNCLDILAEAHGTRPDLTDQPLPDADHTWYTDGS |
| | SLLQEGQRKAGAAVTTETEVIWAKALPAGTSAQRAELIALTQALKMA |
| | EGKKLNVYTDSRYAFATAHIHGEIYRRRGWLTSEGKEIKNKDEILALL |
| | KALFLPKRLSIIHCPGHQKGHSAEARGNRMADQAARKAAITETPDTST |
| | LLIENSSP (SEQ ID NO: 712) |
| M-MLV RT | TLNIEDEYRLHETSKEPDVSLGSTWLSDFPQAWAETGGMGLAVRQAP |
| D200N | LIIPLKATSTPVSIKQYPMSQEARLGIKPHIQRLLDQGILVPCQSPWNTPL |
| T330P | LPVKKPGTNDYRPVQDLREVNKRVEDIHPTVPNPYNLLSGPPPSHQWY |
| L603W | TVLDLKDAFFCLRLHPTSQPLFAFEWRDPEMGISGQLTWTRLPQGFKN |
| E607K | SPTLFNEALHRDLADFRIQHPDLILLQYVDDLLLAATSELDCQQGTRAL |
| L139P | LQTLGNLGYRASAKKAQICQKQVKYLGYLLKEGQRWLTEARKETVM |
| | GQPTPKTPRQLREFLGTAGFCRLWIPGFAEMAAPLYPLTKPGTLFNWG |
| | PDQQKAYQEIKQALLTAPALGLPDLTKPFELFVDEKQGYAKGVLTQKL |
| | GPWRRPVAYLSKKLDPVAAGWPPCLRMVAAIAVLTKDAGKLTMGQP |
| | LVILAPHAVEALVKQPPDRWLSNARMTHYQALLLDTDRVQFGPVVAL |
| | NPATLLPLPEEGLQHNCLDILAEAHGTRPDLTDQPLPDADHTWYTDGS |
| | SLLQEGQRKAGAAVTTETEVIWAKALPAGTSAQRAELIALTQALKMA |
| | EGKKLNVYTDSRYAFATAHIHGEIYRRRGWLTSKGKEIKNKDEILALL |
| | KALFLPKRLSIIHCPGHQKGHSAEARGNRMADQAARKAAITETPDTST |
| | LLIENSSP (SEQ ID NO: 713) |
| M-MLV RT | TLNIEDEYRLHETSKEPDVSLGSTWLSDFPQAWAETGGMGLAVRQAP |
| P51L S67K | LIILLKATSTPVSIKQYPMKQEARLGIKPHIQRLLDQGILVPCQSPWNTP |
| T197A | LLPVKKPGTNDYRPVQDLREVNKRVEDIHPTVPNPYNLLSGLPPSHQW |
| H204R | YTVLDLKDAFFCLRLHPTSQPLFAFEWRDPEMGISGQLTWTRLPQGFK |
| E302K | NSPALFDEALRRDLADFRIQHPDLILLQYVDDLLLAATSELDCQQGTR |
| F309N | ALLQTLGNLGYRASAKKAQICQKQVKYLGYLLKEGQRWLTEARKET |
| W313F | VMGQPTPKTPRQLRKFLGTAGNCRLFIPGFAEMAAPLYPLTKPGTLFN |
| T330P | WGPDQQKAYQEIKQALLTAPALGLPDLTKPFELFVDEKQGYAKGVLT |
| L435G | QKLGPWRRPVAYLSKKLDPVAAGWPPCLRMVAAIAVLTKDAGKLTM |
| N454K | GQPLVIGAPHAVEALVKQPPDRWLSKARMTHYQALLLDTDRVQFGPV |
| D524G | VALNPATLLPLPEEGLQHNCLDILAEAHGTRPDLTDQPLPDADHTWYT |
| D583N | GGSSLLQEGQRKAGAAVTTETEVIWAKALPAGTSAQRAELIALTQALK |
| H594Q | MAEGKKLNVYTNSRYAFATAHIQGEIYRRRGLLTSEGKEIKNKDEILA |
| D653N | LLKALFLPKRLSIIHCPGHQKGHSAEARGNRMANQAARKAAITETPDT |
| | STLLIENSSP (SEQ ID NO: 714) |
| M-MLV RT | TLNIEDEYRLHETSKEPDVSLGSTWLSDFPQAWAETGGMGLAVRQAP |
| D200N P51L | LIILLKATSTPVSIKQYPMKQEARLGIKPHIQRLLDQGILVPCQSPWNTP |
| S67K T197A | LLPVKKPGTNDYRPVQDLREVNKRVEDIHPTVPNPYNLLSGLPPSHQW |
| H204R | YTVLDLKDAFFCLRLHPTSQPLFAFEWRDPEMGISGQLTWTRLPQGFK |
| E302K | NSPALFNEALRRDLADFRIQHPDLILLQYVDDLLLAATSELDCQQGTR |
| F309N | ALLQTLGNLGYRASAKKAQICQKQVKYLGYLLKEGQRWLTEARKET |
| W313F | VMGQPTPKTPRQLRKFLGTAGNCRLFIPGFAEMAAPLYPLTKPGTLFN |
| T330P L345G | WGPDQQKAYQEIKQALLTAPALGLPDLTKPFELFVDEKQGYAKGVLT |
| N454K | QKLGPWRRPVAYLSKKLDPVAAGWPPCLRMVAAIAVLTKDAGKLTM |
| D524G | GQPLVIGAPHAVEALVKQPPDRWLSKARMTHYQALLLDTDRVQFGPV |
| D583N | VALNPATLLPLPEEGLQHNCLDILAEAHGTRPDLTDQPLPDADHTWYT |
| H594Q | GGSSLLQEGQRKAGAAVTTETEVIWAKALPAGTSAQRAELIALTQALK |
| D653N | MAEGKKLNVYTNSRYAFATAHIQGEIYRRRGLLTSEGKEIKNKDEILA |
| | LLKALFLPKRLSIIHCPGHQKGHSAEARGNRMANQAARKAAITETPDT |
| | STLLIENSSP (SEQ ID NO: 715) |
| M-MLV RT | TLNIEDEYRLHETSKEPDVSLGSTWLSDFPQAWAETGGMGLAVRQAP |
| D200N | LIIPLKATSTPVSIKQYPMSQEARLGIKPHIQRLLDQGILVPCQSPWNTPL |
| T330P | LPVKKPGTNDYRPVQDLREVNKRVEDIHPTVPNPYNLLSGLPPSHQWY |
| L603W | TVLDLKDAFFCLRLHPTSQPLFAFEWRDPEMGISGQLTWTRLPQGFKN |
| T306K | SPTLFNEALHRDLADFRIQHPDLILLQYVDDLLLAATSELDCQQGTRAL |
| W313F | LQTLGNLGYRASAKKAQICQKQVKYLGYLLKEGQRWLTEARKETVM |
| in PE2 | GQPTPKTPRQLREFLGKAGFCRLFIPGFAEMAAPLYPLTKPGTLFNWG |
| | PDQQKAYQEIKQALLTAPALGLPDLTKPFELFVDEKQGYAKGVLTQKL |
| | GPWRRPVAYLSKKLDPVAAGWPPCLRMVAAIAVLTKDAGKLTMGQP |
| | LVILAPHAVEALVKQPPDRWLSNARMTHYQALLLDTDRVQFGPVVAL |
| | NPATLLPLPEEGLQHNCLDILAEAHGTRPDLTDQPLPDADHTWYTDGS |
| | SLLQEGQRKAGAAVTTETEVIWAKALPAGTSAQRAELIALTQALKMA |
| | EGKKLNVYTDSRYAFATAHIHGEIYRRRGWLTSEGKEIKNKDEILALL |
| | KALFLPKRLSIIHCPGHQKGHSAEARGNRMADQAARKAAITETPDTST |
| | LLIENSSP (SEQ ID NO: 716) |

[0482] In various other embodiments, the prime editors described herein (with RT provided as either a fusion partner or in trans) can include a variant RT comprising one or more of the following mutations: P51X, S67X, E69X, L139X, T197X, D200X, H204X, F209X, E302X, T306X, F309X, W313X, T330X, L345X, L435X, N454X, D524X, E562X, D583X, H594X, L603X, E607X, or D653X in the wild type M-MLV RT of SEQ ID NO: 89 or at a corresponding amino acid position in another wild type RT polypeptide sequence, wherein “X” can be any amino acid.

[0483] In various other embodiments, the prime editors described herein (with RT provided as either a fusion partner or in trans) can include a variant RT comprising a P51X mutation in the wild type M-MLV RT of SEQ ID NO: 89 or at a corresponding amino acid position in another wild type RT polypeptide sequence, wherein “X” can be any amino acid. In certain embodiments, X is L.

[0484] In various other embodiments, the prime editors described herein (with RT provided as either a fusion partner or in trans) can include a variant RT comprising a S67X mutation in the wild type M-MLV RT of SEQ ID NO: 89 or at a corresponding amino acid position in another wild type RT polypeptide sequence, wherein “X” can be any amino acid. In certain embodiments, X is K.

[0485] In various other embodiments, the prime editors described herein (with RT provided as either a fusion partner or in trans) can include a variant RT comprising a E69X mutation in the wild type M-MLV RT of SEQ ID NO: 89 or at a corresponding amino acid position in another wild type RT polypeptide sequence, wherein “X” can be any amino acid. In certain embodiments, X is K.

[0486] In various other embodiments, the prime editors described herein (with RT provided as either a fusion partner or in trans) can include a variant RT comprising a L139X mutation in the wild type M-MLV RT of SEQ ID NO: 89 or at a corresponding amino acid position in another wild type RT polypeptide sequence, wherein “X” can be any amino acid. In certain embodiments, X is P.

[0487] In various other embodiments, the prime editors described herein (with RT provided as either a fusion partner or in trans) can include a variant RT comprising a T197X mutation in the wild type M-MLV RT of SEQ ID NO: 89 or at a corresponding amino acid position in another wild type RT polypeptide sequence, wherein “X” can be any amino acid. In certain embodiments, X is A.

[0488] In various other embodiments, the prime editors described herein (with RT provided as either a fusion partner or in trans) can include a variant RT comprising a D200X mutation in the wild type M-MLV RT of SEQ ID NO: 89 or at a corresponding amino acid position in another wild type RT polypeptide sequence, wherein “X” can be any amino acid. In certain embodiments, X is N.

[0489] In various other embodiments, the prime editors described herein (with RT provided as either a fusion partner or in trans) can include a variant RT comprising a H204X mutation in the wild type M-MLV RT of SEQ ID NO: 89 or at a corresponding amino acid position in another wild type RT polypeptide sequence, wherein “X” can be any amino acid. In certain embodiments, X is R.

[0490] In various other embodiments, the prime editors described herein (with RT provided as either a fusion partner or in trans) can include a variant RT comprising a F209X mutation in the wild type M-MLV RT of SEQ ID NO: 89 or at a corresponding amino acid position in another wild type RT polypeptide sequence, wherein “X” can be any amino acid. In certain embodiments, X is N.

[0491] In various other embodiments, the prime editors described herein (with RT provided as either a fusion partner or in trans) can include a variant RT comprising a E302X mutation in the wild type M-MLV RT of SEQ ID NO: 89 or at a corresponding amino acid position in another wild type RT polypeptide sequence, wherein “X” can be any amino acid. In certain embodiments, X is K.

[0492] In various other embodiments, the prime editors described herein (with RT provided as either a fusion partner or in trans) can include a variant RT comprising a E302X mutation in the wild type M-MLV RT of SEQ ID NO: 89 or at a corresponding amino acid position in another wild type RT polypeptide sequence, wherein “X” can be any amino acid. In certain embodiments, X is R.

[0493] In various other embodiments, the prime editors described herein (with RT provided as either a fusion partner or in trans) can include a variant RT comprising a T306X mutation in the wild type M-MLV RT of SEQ ID NO: 89 or at a corresponding amino acid position in another wild type RT polypeptide sequence, wherein “X” can be any amino acid. In certain embodiments, X is K.

[0494] In various other embodiments, the prime editors described herein (with RT provided as either a fusion partner or in trans) can include a variant RT comprising a F309X mutation in the wild type M-MLV RT of SEQ ID NO: 89 or at a corresponding amino acid position in another wild type RT polypeptide sequence, wherein “X” can be any amino acid. In certain embodiments, X is N.

[0495] In various other embodiments, the prime editors described herein (with RT provided as either a fusion partner or in trans) can include a variant RT comprising a W313X mutation in the wild type M-MLV RT of SEQ ID NO: 89 or at a corresponding amino acid position in another wild type RT polypeptide sequence, wherein “X” can be any amino acid. In certain embodiments, X is F.

[0496] In various other embodiments, the prime editors described herein (with RT provided as either a fusion partner or in trans) can include a variant RT comprising a T330X mutation in the wild type M-MLV RT of SEQ ID NO: 89 or at a corresponding amino acid position in another wild type RT polypeptide sequence, wherein “X” can be any amino acid. In certain embodiments, X is P.

[0497] In various other embodiments, the prime editors described herein (with RT provided as either a fusion partner or in trans) can include a variant RT comprising a L345X mutation in the wild type M-MLV RT of SEQ ID NO: 89 or at a corresponding amino acid position in another wild type RT polypeptide sequence, wherein “X” can be any amino acid. In certain embodiments, X is G.

[0498] In various other embodiments, the prime editors described herein (with RT provided as either a fusion partner or in trans) can include a variant RT comprising a L435X mutation in the wild type M-MLV RT of SEQ ID NO: 89 or at a corresponding amino acid position in another wild type RT polypeptide sequence, wherein “X” can be any amino acid. In certain embodiments, X is G.

[0499] In various other embodiments, the prime editors described herein (with RT provided as either a fusion partner or in trans) can include a variant RT comprising a N454X mutation in the wild type M-MLV RT of SEQ ID NO: 89 or at a corresponding amino acid position in another wild type RT polypeptide sequence, wherein “X” can be any amino acid. In certain embodiments, X is K.

[0500] In various other embodiments, the prime editors described herein (with RT provided as either a fusion partner or in trans) can include a variant RT comprising a D524X mutation in the wild type M-MLV RT of SEQ ID NO: 89 or at a corresponding amino acid position in another wild type RT polypeptide sequence, wherein “X” can be any amino acid. In certain embodiments, X is G.

[0501] In various other embodiments, the prime editors described herein (with RT provided as either a fusion partner or in trans) can include a variant RT comprising a E562X mutation in the wild type M-MLV RT of SEQ ID NO: 89 or at a corresponding amino acid position in another wild type RT polypeptide sequence, wherein “X” can be any amino acid. In certain embodiments, X is Q.

[0502] In various other embodiments, the prime editors described herein (with RT provided as either a fusion partner or in trans) can include a variant RT comprising a D583X mutation in the wild type M-MLV RT of SEQ ID NO: 89 or at a corresponding amino acid position in another wild type RT polypeptide sequence, wherein “X” can be any amino acid. In certain embodiments, X is N.

[0503] In various other embodiments, the prime editors described herein (with RT provided as either a fusion partner or in trans) can include a variant RT comprising a H594X mutation in the wild type M-MLV RT of SEQ ID NO: 89 or at a corresponding amino acid position in another wild type RT polypeptide sequence, wherein “X” can be any amino acid. In certain embodiments, X is Q.

[0504] In various other embodiments, the prime editors described herein (with RT provided as either a fusion partner or in trans) can include a variant RT comprising a L603X mutation in the wild type M-MLV RT of SEQ ID NO: 89 or at a corresponding amino acid position in another wild type RT polypeptide sequence, wherein “X” can be any amino acid. In certain embodiments, X is W.

[0505] In various other embodiments, the prime editors described herein (with RT provided as either a fusion partner or in trans) can include a variant RT comprising a E607X mutation in the wild type M-MLV RT of SEQ ID NO: 89 or at a corresponding amino acid position in another wild type RT polypeptide sequence, wherein “X” can be any amino acid. In certain embodiments, X is K.

[0506] In various other embodiments, the prime editors described herein (with RT provided as either a fusion partner or in trans) can include a variant RT comprising a D653X mutation in the wild type M-MLV RT of SEQ ID NO: 89 or at a corresponding amino acid position in another wild type RT polypeptide sequence, wherein “X” can be any amino acid. In certain embodiments, X is N.

[0507] Some exemplary reverse transcriptases that can be fused to napDNAbp proteins or provided as individual proteins according to various embodiments of this disclosure are provided below. Exemplary reverse transcriptases include variants with at least 80%, at least 85%, at least 90%, at least 95% or at least 99% sequence identity to the following wild-type enzymes or partial enzymes:

| DESCRIPTION | SEQUENCE (VARIANT SUBSTITUTIONS RELATIVE TO WILD TYPE) |
|---|---|
| REVERSE | TLNIEDEYRLHETSKEPDVSLGSTWLSDFPQAWAETGGMGLAVRQAPL |
| TRANSCRIPTASE | IIPLKATSTPVSIKQYPMSQEARLGIKPHIQRLLDQGILVPCQSPWNTPLL |
| M- | PVKKPGTNDYRPVQDLREVNKRVEDIHPTVPNPYNLLSGLPPSHQWYT |
| MLV RT) | VLDLKDAFFCLRLHPTSQPLFAFEWRDPEMGISGQLTWTRLPQGFKNSP |
| WILD TYPE | TLFDEALHRDLADFRIQHPDLILLQYVDDLLLAATSELDCQQGTRALLQ |
| MOLONEY | TLGNLGYRASAKKAQICQKQVKYLGYLLKEGQRWLTEARKETVMGQ |
| MURINE | PTPKTPRQLREFLGTAGFCRLWIPGFAEMAAPLYPLTKTGTLFNWGPDQ |
| LEUKEMIA | QKAYQEIKQALLTAPALGLPDLTKPFELFVDEKQGYAKGVLTQKLGPW |
| VIRUS | RRPVAYLSKKLDPVAAGWPPCLRMVAAIAVLTKDAGKLTMGQPLVILA |
| USED IN | PHAVEALVKQPPDRWLSNARMTHYQALLLDTDRVQFGPVVALNPATLL |
| PE1(PRIME | PLPEEGLQHNCLDILAEAHGTRPDLTDQPLPDADHTWYTDGSSLLQEG |
| EDITOR 1 | QRKAGAAVTTETEVIWAKALPAGTSAQRAELIALTQALKMAEGKKLN |
| FUSION | VYTDSRYAFATAHIHGEIYRRRGLLTSEGKEIKNKDEILALLKALFLPKR |
| PROTEIN | LSIIHCPGHQKGHSAEARGNRMADQAARKAAITETPDTSTLLIENSSP |
| DISCLOSED | (SEQ ID NO: 89) |
| HEREIN) | |
| M-MLV RT | TLNIEDEYRLHETSKEPDVSLGSTWLSDFPQAWAETGGMGLAVRQAPL |
| D200N | IIPLKATSTPVSIKQYPMSQEARLGIKPHIQRLLDQGILVPCQSPWNTPLL |
| | PVKKPGTNDYRPVQDLREVNKRVEDIHPTVPNPYNLLSGLPPSHQWYT |
| | VLDLKDAFFCLRLHPTSQPLFAFEWRDPEMGISGQLTWTRLPQGFKNSP |
| | TLFNEALHRDLADFRIQHPDLILLQYVDDLLLAATSELDCQQGTRALLQ |
| | TLGNLGYRASAKKAQICQKQVKYLGYLLKEGQRWLTEARKETVMGQ |
| | PTPKTPRQLREFLGTAGFCRLWIPGFAEMAAPLYPLTKTGTLFNWGPDQ |
| | QKAYQEIKQALLTAPALGLPDLTKPFELFVDEKQGYAKGVLTQKLGPW |
| | RRPVAYLSKKLDPVAAGWPPCLRMVAAIAVLTKDAGKLTMGQPLVILA |
| | PHAVEALVKQPPDRWLSNARMTHYQALLLDTDRVQFGPVVALNPATLL |
| | PLPEEGLQHNCLDILAEAHGTRPDLTDQPLPDADHTWYTDGSSLLQEG |
| | QRKAGAAVTTETEVIWAKALPAGTSAQRAELIALTQALKMAEGKKLN |
| | VYTDSRYAFATAHIHGEIYRRRGLLTSEGKEIKNKDEILALLKALFLPKR |
| | LSIIHCPGHQKGHSAEARGNRMADQAARKAAITETPDTSTLLIENSSP |
| | (SEQ ID NO: 106) |
| M-MLV RT | TLNIEDEYRLHETSKEPDVSLGSTWLSDFPQAWAETGGMGLAVRQAPL |
| D200N | IIPLKATSTPVSIKQYPMSQEARLGIKPHIQRLLDQGILVPCQSPWNTPLL |
| T330P | PVKKPGTNDYRPVQDLREVNKRVEDIHPTVPNPYNLLSGLPPSHQWYT |
| | VLDLKDAFFCLRLHPTSQPLFAFEWRDPEMGISGQLTWTRLPQGFKNSP |
| | TLFNEALHRDLADFRIQHPDLILLQYVDDLLLAATSELDCQQGTRALLQ |
| | TLGNLGYRASAKKAQICQKQVKYLGYLLKEGQRWLTEARKETVMGQ |
| | PTPKTPRQLREFLGTAGFCRLWIPGFAEMAAPLYPLTKPGTLFNWGPDQ |
| | QKAYQEIKQALLTAPALGLPDLTKPFELFVDEKQGYAKGVLTQKLGPW |
| | RRPVAYLSKKLDPVAAGWPPCLRMVAAIAVLTKDAGKLTMGQPLVILA |
| | PHAVEALVKQPPDRWLSNARMTHYQALLLDTDRVQFGPVVALNPATLL |
| | PLPEEGLQHNCLDILAEAHGTRPDLTDQPLPDADHTWYTDGSSLLQEG |
| | QRKAGAAVTTETEVIWAKALPAGTSAQRAELIALTQALKMAEGKKLN |
| | VYTDSRYAFATAHIHGEIYRRRGLLTSEGKEIKNKDEILALLKALFLPKR |
| | LSIIHCPGHQKGHSAEARGNRMADQAARKAAITETPDTSTLLIENSSP |
| | (SEQ ID NO: 107) |
| M-MLV RT | TLNIEDEYRLHETSKEPDVSLGSTWLSDFPQAWAETGGMGLAVRQAPL |
| D200N | IIPLKATSTPVSIKQYPMSQEARLGIKPHIQRLLDQGILVPCQSPWNTPLL |
| T330P | PVKKPGTNDYRPVQDLREVNKRVEDIHPTVPNPYNLLSGLPPSHQWYT |
| L603W | VLDLKDAFFCLRLHPTSQPLFAFEWRDPEMGISGQLTWTRLPQGFKNSP |
| | TLFNEALHRDLADFRIQHPDLILLQYVDDLLLAATSELDCQQGTRALLQ |
| | TLGNLGYRASAKKAQICQKQVKYLGYLLKEGQRWLTEARKETVMGQ |
| | PTPKTPRQLREFLGTAGFCRLWIPGFAEMAAPLYPLTKPGTLFNWGPDQ |
| | QKAYQEIKQALLTAPALGLPDLTKPFELFVDEKQGYAKGVLTQKLGPW |
| | RRPVAYLSKKLDPVAAGWPPCLRMVAAIAVLTKDAGKLTMGQPLVILA |
| | PHAVEALVKQPPDRWLSNARMTHYQALLLDTDRVQFGPVVALNPATLL |
| | PLPEEGLQHNCLDILAEAHGTRPDLTDQPLPDADHTWYTDGSSLLQEG |
| | QRKAGAAVTTETEVIWAKALPAGTSAQRAELIALTQALKMAEGKKLN |
| | VYTDSRYAFATAHIHGEIYRRRGWLTSEGKEIKNKDEILALLKALFLPKR |
| | LSIIHCPGHQKGHSAEARGNRMADQAARKAAITETPDTSTLLIENSSP |
| | (SEQ ID NO: 108) |
| M-MLV RT | TLNIEDEYRLHETSKEPDVSLGSTWLSDFPQAWAETGGMGLAVRQAPL |
| E69K | IIPLKATSTPVSIKQYPMSQKARLGIKPHIQRLLDQGILVPCQSPWNTPLL |
| D200N | PVKKPGTNDYRPVQDLREVNKRVEDIHPTVPNPYNLLSGLPPSHQWYT |
| T330P | VLDLKDAFFCLRLHPTSQPLFAFEWRDPEMGISGQLTWTRLPQGFKNSP |
| L603W | TLFNEALHRDLADFRIQHPDLILLQYVDDLLLAATSELDCQQGTRALLQ |
| | TLGNLGYRASAKKAQICQKQVKYLGYLLKEGQRWLTEARKETVMGQ |
| | PTPKTPRQLREFLGTAGFCRLWIPGFAEMAAPLYPLTKPGTLFNWGPDQ |
| | QKAYQEIKQALLTAPALGLPDLTKPFELFVDEKQGYAKGVLTQKLGPW |
| | RRPVAYLSKKLDPVAAGWPPCLRMVAAIAVLTKDAGKLTMGQPLVILA |
| | PHAVEALVKQPPDRWLSNARMTHYQALLLDTDRVQFGPVVALNPATLL |
| | PLPEEGLQHNCLDILAEAHGTRPDLTDQPLPDADHTWYTDGSSLLQEG |
| | QRKAGAAVTTETEVIWAKALPAGTSAQRAELIALTQALKMAEGKKLN |
| | VYTDSRYAFATAHIHGEIYRRRGWLTSEGKEIKNKDEILALLKALFLPKR |
| | LSIIHCPGHQKGHSAEARGNRMADQAARKAAITETPDTSTLLIENSSP |
| | (SEQ ID NO: 109) |
| M-MLV RT | TLNIEDEYRLHETSKEPDVSLGSTWLSDFPQAWAETGGMGLAVRQAPL |
| D200N | IIPLKATSTPVSIKQYPMSQEARLGIKPHIQRLLDQGILVPCQSPWNTPLL |
| T330P | PVKKPGTNDYRPVQDLREVNKRVEDIHPTVPNPYNLLSGLPPSHQWYT |
| L603W | VLDLKDAFFCLRLHPTSQPLFAFEWRDPEMGISGQLTWTRLPQGFKNSP |
| E302R | TLFNEALHRDLADFRIQHPDLILLQYVDDLLLAATSELDCQQGTRALLQ |
| | TLGNLGYRASAKKAQICQKQVKYLGYLLKEGQRWLTEARKETVMGQ |
| | PTPKTPRQLRRFLGTAGFCRLWIPGFAEMAAPLYPLTKPGTLFNWGPDQ |
| | QKAYQEIKQALLTAPALGLPDLTKPFELFVDEKQGYAKGVLTQKLGPW |
| | RRPVAYLSKKLDPVAAGWPPCLRMVAAIAVLTKDAGKLTMGQPLVILA |
| | PHAVEALVKQPPDRWLSNARMTHYQALLLDTDRVQFGPVVALNPATLL |
| | PLPEEGLQHNCLDILAEAHGTRPDLTDQPLPDADHTWYTDGSSLLQEG |
| | QRKAGAAVTTETEVIWAKALPAGTSAQRAELIALTQALKMAEGKKLN |
| | VYTDSRYAFATAHIHGEIYRRRGWLTSEGKEIKNKDEILALLKALFLPKR |
| | LSIIHCPGHQKGHSAEARGNRMADQAARKAAITETPDTSTLLIENSSP |
| | (SEQ ID NO: 110) |
| M-MLV RT | TLNIEDEYRLHETSKEPDVSLGSTWLSDFPQAWAETGGMGLAVRQAPL |
| D200N | IIPLKATSTPVSIKQYPMSQEARLGIKPHIQRLLDQGILVPCQSPWNTPLL |
| T330P | PVKKPGTNDYRPVQDLREVNKRVEDIHPTVPNPYNLLSGLPPSHQWYT |
| L603W | VLDLKDAFFCLRLHPTSQPLFAFEWRDPEMGISGQLTWTRLPQGFKNSP |
| E607K | TLFNEALHRDLADFRIQHPDLILLQYVDDLLLAATSELDCQQGTRALLQ |
| | TLGNLGYRASAKKAQICQKQVKYLGYLLKEGQRWLTEARKETVMGQ |
| | PTPKTPRQLREFLGTAGFCRLWIPGFAEMAAPLYPLTKPGTLFNWGPDQ |
| | QKAYQEIKQALLTAPALGLPDLTKPFELFVDEKQGYAKGVLTQKLGPW |
| | RRPVAYLSKKLDPVAAGWPPCLRMVAAIAVLTKDAGKLTMGQPLVILA |
| | PHAVEALVKQPPDRWLSNARMTHYQALLLDTDRVQFGPVVALNPATLL |
| | PLPEEGLQHNCLDILAEAHGTRPDLTDQPLPDADHTWYTDGSSLLQEG |
| | QRKAGAAVTTETEVIWAKALPAGTSAQRAELIALTQALKMAEGKKLN |
| | VYTDSRYAFATAHIHGEIYRRRGWLTSKGKEIKNKDEILALLKALFLPK |
| | RLSIIHCPGHQKGHSAEARGNRMADQAARKAAITETPDTSTLLIENSSP |
| | (SEQ ID NO: 111) |
| M-MLV RT | TLNIEDEYRLHETSKEPDVSLGSTWLSDFPQAWAETGGMGLAVRQAPL |
| D200N | IIPLKATSTPVSIKQYPMSQEARLGIKPHIQRLLDQGILVPCQSPWNTPLL |
| T330P | PVKKPGTNDYRPVQDLREVNKRVEDIHPTVPNPYNLLSGPPPSHQWYT |
| L603W | VLDLKDAFFCLRLHPTSQPLFAFEWRDPEMGISGQLTWTRLPQGFKNSP |
| L139P | TLFNEALHRDLADFRIQHPDLILLQYVDDLLLAATSELDCQQGTRALLQ |
| | TLGNLGYRASAKKAQICQKQVKYLGYLLKEGQRWLTEARKETVMGQ |
| | PTPKTPRQLREFLGTAGFCRLWIPGFAEMAAPLYPLTKPGTLFNWGPDQ |
| | QKAYQEIKQALLTAPALGLPDLTKPFELFVDEKQGYAKGVLTQKLGPW |
| | RRPVAYLSKKLDPVAAGWPPCLRMVAAIAVLTKDAGKLTMGQPLVILA |
| | PHAVEALVKQPPDRWLSNARMTHYQALLLDTDRVQFGPVVALNPATLL |
| | PLPEEGLQHNCLDILAEAHGTRPDLTDQPLPDADHTWYTDGSSLLQEG |
| | QRKAGAAVTTETEVIWAKALPAGTSAQRAELIALTQALKMAEGKKLN |
| | VYTDSRYAFATAHIHGEIYRRRGWLTSEGKEIKNKDEILALLKALFLPKR |
| | LSIIHCPGHQKGHSAEARGNRMADQAARKAAITETPDTSTLLIENSSP |
| | (SEQ ID NO: 112) |
| M-MLV RT | TLNIEDEYRLHETSKEPDVSLGSTWLSDFPQAWAETGGMGLAVRQAPL |
| D200N | IIPLKATSTPVSIKQYPMSQEARLGIKPHIQRLLDQGILVPCQSPWNTPLL |
| T330P | PVKKPGTNDYRPVQDLREVNKRVEDIHPTVPNPYNLLSGLPPSHQWYT |
| L603W | VLDLKDAFFCLRLHPTSQPLFAFEWRDPEMGISGQLTWTRLPQGFKNSP |
| L435G | TLFNEALHRDLADFRIQHPDLILLQYVDDLLLAATSELDCQQGTRALLQ |
| | TLGNLGYRASAKKAQICQKQVKYLGYLLKEGQRWLTEARKETVMGQ |
| | PTPKTPRQLREFLGTAGFCRLWIPGFAEMAAPLYPLTKPGTLFNWGPDQ |
| | QKAYQEIKQALLTAPALGLPDLTKPFELFVDEKQGYAKGVLTQKLGPW |
| | RRPVAYLSKKLDPVAAGWPPCLRMVAAIAVLTKDAGKLTMGQPLVIGA |
| | PHAVEALVKQPPDRWLSNARMTHYQALLLDTDRVQFGPVVALNPATLL |
| | PLPEEGLQHNCLDILAEAHGTRPDLTDQPLPDADHTWYTDGSSLLQEG |
| | QRKAGAAVTTETEVIWAKALPAGTSAQRAELIALTQALKMAEGKKLN |
| | VYTDSRYAFATAHIHGEIYRRRGWLTSEGKEIKNKDEILALLKALFLPKR |
| | LSIIHCPGHQKGHSAEARGNRMADQAARKAAITETPDTSTLLIENSSP |
| | (SEQ ID NO: 113) |
| M-MLV RT | TLNIEDEYRLHETSKEPDVSLGSTWLSDFPQAWAETGGMGLAVRQAPL |
| D200N | IIPLKATSTPVSIKQYPMSQEARLGIKPHIQRLLDQGILVPCQSPWNTPLL |
| T330P | PVKKPGTNDYRPVQDLREVNKRVEDIHPTVPNPYNLLSGLPPSHQWYT |
| L603W | VLDLKDAFFCLRLHPTSQPLFAFEWRDPEMGISGQLTWTRLPQGFKNSP |
| N454K | TLFNEALHRDLADFRIQHPDLILLQYVDDLLLAATSELDCQQGTRALLQ |
| | TLGNLGYRASAKKAQICQKQVKYLGYLLKEGQRWLTEARKETVMGQ |
| | PTPKTPRQLREFLGTAGFCRLWIPGFAEMAAPLYPLTKPGTLFNWGPDQ |
| | QKAYQEIKQALLTAPALGLPDLTKPFELFVDEKQGYAKGVLTQKLGPW |
| | RRPVAYLSKKLDPVAAGWPPCLRMVAAIAVLTKDAGKLTMGQPLVILA |
| | PHAVEALVKQPPDRWLSKARMTHYQALLLDTDRVQFGPVVALNPATLL |
| | PLPEEGLQHNCLDILAEAHGTRPDLTDQPLPDADHTWYTDGSSLLQEG |
| | QRKAGAAVTTETEVIWAKALPAGTSAQRAELIALTQALKMAEGKKLN |
| | VYTDSRYAFATAHIHGEIYRRRGWLTSEGKEIKNKDEILALLKALFLPKR |
| | LSIIHCPGHQKGHSAEARGNRMADQAARKAAITETPDTSTLLIENSSP |
| | (SEQ ID NO: 114) |
| M-MLV RT | TLNIEDEYRLHETSKEPDVSLGSTWLSDFPQAWAETGGMGLAVRQAPL |
| D200N | IIPLKATSTPVSIKQYPMSQEARLGIKPHIQRLLDQGILVPCQSPWNTPLL |
| T330P | PVKKPGTNDYRPVQDLREVNKRVEDIHPTVPNPYNLLSGLPPSHQWYT |
| L603W | VLDLKDAFFCLRLHPTSQPLFAFEWRDPEMGISGQLTWTRLPQGFKNSP |
| T306K | TLFNEALHRDLADFRIQHPDLILLQYVDDLLLAATSELDCQQGTRALLQ |
| | TLGNLGYRASAKKAQICQKQVKYLGYLLKEGQRWLTEARKETVMGQ |
| | PTPKTPRQLREFLGKAGFCRLWIPGFAEMAAPLYPLTKPGTLFNWGPD |
| | QQKAYQEIKQALLTAPALGLPDLTKPFELFVDEKQGYAKGVLTQKLGP |
| | WRRPVAYLSKKLDPVAAGWPPCLRMVAAIAVLTKDAGKLTMGQPLVIL |
| | APHAVEALVKQPPDRWLSNARMTHYQALLLDTDRVQFGPVVALNPAT |
| | LLPLPEEGLQHNCLDILAEAHGTRPDLTDQPLPDADHTWYTDGSSLLQ |
| | EGQRKAGAAVTTETEVIWAKALPAGTSAQRAELIALTQALKMAEGKKL |
| | NVYTDSRYAFATAHIHGEIYRRRGWLTSEGKEIKNKDEILALLKALFLP |
| | KRLSIIHCPGHQKGHSAEARGNRMADQAARKAAITETPDTSTLLIENSSP |
| | (SEQ ID NO: 115) |
| M-MLV RT | TLNIEDEYRLHETSKEPDVSLGSTWLSDFPQAWAETGGMGLAVRQAPL |
| D200N | IIPLKATSTPVSIKQYPMSQEARLGIKPHIQRLLDQGILVPCQSPWNTPLL |
| T330P | PVKKPGTNDYRPVQDLREVNKRVEDIHPTVPNPYNLLSGLPPSHQWYT |
| L603W | VLDLKDAFFCLRLHPTSQPLFAFEWRDPEMGISGQLTWTRLPQGFKNSP |
| W313F | TLFNEALHRDLADFRIQHPDLILLQYVDDLLLAATSELDCQQGTRALLQ |
| | TLGNLGYRASAKKAQICQKQVKYLGYLLKEGQRWLTEARKETVMGQ |
| | PTPKTPRQLREFLGTAGFCRLFIPGFAEMAAPLYPLTKPGTLFNWGPDQ |
| | QKAYQEIKQALLTAPALGLPDLTKPFELFVDEKQGYAKGVLTQKLGPW |
| | RRPVAYLSKKLDPVAAGWPPCLRMVAAIAVLTKDAGKLTMGQPLVILA |
| | PHAVEALVKQPPDRWLSNARMTHYQALLLDTDRVQFGPVVALNPATLL |
| | PLPEEGLQHNCLDILAEAHGTRPDLTDQPLPDADHTWYTDGSSLLQEG |
| | QRKAGAAVTTETEVIWAKALPAGTSAQRAELIALTQALKMAEGKKLN |
| | VYTDSRYAFATAHIHGEIYRRRGWLTSEGKEIKNKDEILALLKALFLPKR |
| | LSIIHCPGHQKGHSAEARGNRMADQAARKAAITETPDTSTLLIENSSP |
| | (SEQ ID NO: 116) |
| M-MLV RT | TLNIEDEYRLHETSKEPDVSLGSTWLSDFPQAWAETGGMGLAVRQAPL |
| D200N | IIPLKATSTPVSIKQYPMSQEARLGIKPHIQRLLDQGILVPCQSPWNTPLL |
| T330P | PVKKPGTNDYRPVQDLREVNKRVEDIHPTVPNPYNLLSGLPPSHQWYT |
| L603W | VLDLKDAFFCLRLHPTSQPLFAFEWRDPEMGISGQLTWTRLPQGFKNSP |
| D524G | TLFNEALHRDLADFRIQHPDLILLQYVDDLLLAATSELDCQQGTRALLQ |
| E562Q | TLGNLGYRASAKKAQICQKQVKYLGYLLKEGQRWLTEARKETVMGQ |
| D583N | PTPKTPRQLREFLGTAGFCRLFIPGFAEMAAPLYPLTKPGTLFNWGPDQ |
| | QKAYQEIKQALLTAPALGLPDLTKPFELFVDEKQGYAKGVLTQKLGPW |
| | RRPVAYLSKKLDPVAAGWPPCLRMVAAIAVLTKDAGKLTMGQPLVILA |
| | PHAVEALVKQPPDRWLSNARMTHYQALLLDTDRVQFGPVVALNPATLL |
| | PLPEEGLQHNCLDILAEAHGTRPDLTDQPLPDADHTWYTGGSSLLQEG |
| | QRKAGAAVTTETEVIWAKALPAGTSAQRAQLIALTQALKMAEGKKLN |
| | VYTNSRYAFATAHIHGEIYRRRGWLTSEGKEIKNKDEILALLKALFLPKR |
| | LSIIHCPGHQKGHSAEARGNRMADQAARKAAITETPDTSTLLIENSSP |
| | (SEQ ID NO: 117) |
| M-MLV RT | TLNIEDEYRLHETSKEPDVSLGSTWLSDFPQAWAETGGMGLAVRQAPL |
| D200N | IIPLKATSTPVSIKQYPMSQEARLGIKPHIQRLLDQGILVPCQSPWNTPLL |
| T330P | PVKKPGTNDYRPVQDLREVNKRVEDIHPTVPNPYNLLSGLPPSHQWYT |
| L603W | VLDLKDAFFCLRLHPTSQPLFAFEWRDPEMGISGQLTWTRLPQGFKNSP |
| E302R | TLFNEALHRDLADFRIQHPDLILLQYVDDLLLAATSELDCQQGTRALLQ |
| W313F | TLGNLGYRASAKKAQICQKQVKYLGYLLKEGQRWLTEARKETVMGQ |
| | PTPKTPRQLRRFLGTAGFCRLFIPGFAEMAAPLYPLTKPGTLFNWGPDQ |
| | QKAYQEIKQALLTAPALGLPDLTKPFELFVDEKQGYAKGVLTQKLGPW |
| | RRPVAYLSKKLDPVAAGWPPCLRMVAAIAVLTKDAGKLTMGQPLVILA |
| | PHAVEALVKQPPDRWLSNARMTHYQALLLDTDRVQFGPVVALNPATLL |
| | PLPEEGLQHNCLDILAEAHGTRPDLTDQPLPDADHTWYTDGSSLLQEG |
| | QRKAGAAVTTETEVIWAKALPAGTSAQRAELIALTQALKMAEGKKLN |
| | VYTDSRYAFATAHIHGEIYRRRGWLTSEGKEIKNKDEILALLKALFLPKR |
| | LSIIHCPGHQKGHSAEARGNRMADQAARKAAITETPDTSTLLIENSSP |
| | (SEQ ID NO: 118) |
| M-MLV RT | TLNIEDEYRLHETSKEPDVSLGSTWLSDFPQAWAETGGMGLAVRQAPL |
| D200N | IIPLKATSTPVSIKQYPMSQEARLGIKPHIQRLLDQGILVPCQSPWNTPLL |
| T330P | PVKKPGTNDYRPVQDLREVNKRVEDIHPTVPNPYNLLSGPPPSHQWYT |
| L603W | VLDLKDAFFCLRLHPTSQPLFAFEWRDPEMGISGQLTWTRLPQGFKNSP |
| E607K | TLFNEALHRDLADFRIQHPDLILLQYVDDLLLAATSELDCQQGTRALLQ |
| L139P | TLGNLGYRASAKKAQICQKQVKYLGYLLKEGQRWLTEARKETVMGQ |
| | PTPKTPRQLREFLGTAGFCRLWIPGFAEMAAPLYPLTKPGTLFNWGPDQ |
| | QKAYQEIKQALLTAPALGLPDLTKPFELFVDEKQGYAKGVLTQKLGPW |
| | RRPVAYLSKKLDPVAAGWPPCLRMVAAIAVLTKDAGKLTMGQPLVILA |
| | PHAVEALVKQPPDRWLSNARMTHYQALLLDTDRVQFGPVVALNPATLL |
| | PLPEEGLQHNCLDILAEAHGTRPDLTDQPLPDADHTWYTDGSSLLQEG |
| | QRKAGAAVTTETEVIWAKALPAGTSAQRAELIALTQALKMAEGKKLN |
| | VYTDSRYAFATAHIHGEIYRRRGWLTSKGKEIKNKDEILALLKALFLPK |
| | RLSIIHCPGHQKGHSAEARGNRMADQAARKAAITETPDTSTLLIENSSP |
| | (SEQ ID NO: 119) |
| M-MLV RT | TLNIEDEYRLHETSKEPDVSLGSTWLSDFPQAWAETGGMGLAVRQAPL |
| P51L S67K | IILLKATSTPVSIKQYPMKQEARLGIKPHIQRLLDQGILVPCQSPWNTPL |
| T197A | LPVKKPGTNDYRPVQDLREVNKRVEDIHPTVPNPYNLLSGLPPSHQWY |
| H204R | TVLDLKDAFFCLRLHPTSQPLFAFEWRDPEMGISGQLTWTRLPQGFKN |
| E302K | SPALFDEALRRDLADFRIQHPDLILLQYVDDLLLAATSELDCQQGTRAL |
| F309N | LQTLGNLGYRASAKKAQICQKQVKYLGYLLKEGQRWLTEARKETVM |
| W313F | GQPTPKTPRQLRKFLGTAGNCRLFIPGFAEMAAPLYPLTKPGTLFNWGP |
| T330P | DQQKAYQEIKQALLTAPALGLPDLTKPFELFVDEKQGYAKGVLTQKLG |
| L435G | PWRRPVAYLSKKLDPVAAGWPPCLRMVAAIAVLTKDAGKLTMGQPLVI |
| N454K | GAPHAVEALVKQPPDRWLSKARMTHYQALLLDTDRVQFGPVVALNPA |
| D524G | TLLPLPEEGLQHNCLDILAEAHGTRPDLTDQPLPDADHTWYTGGSSLL |
| D583N | QEGQRKAGAAVTTETEVIWAKALPAGTSAQRAELIALTQALKMAEGK |
| H594Q | KLNVYTNSRYAFATAHIQGEIYRRRGLLTSEGKEIKNKDEILALLKALFL |
| D653N | PKRLSIIHCPGHQKGHSAEARGNRMANQAARKAAITETPDTSTLLIENS |
| | SP(SEQ ID NO: 120) |
| M-MLV RT | TLNIEDEYRLHETSKEPDVSLGSTWLSDFPQAWAETGGMGLAVRQAPL |
| P51L S67K | IILLKATSTPVSIKQYPMKQEARLGIKPHIQRLLDQGILVPCQSPWNTPL |
| T197A | LPVKKPGTNDYRPVQDLREVNKRVEDIHPTVPNPYNLLSGLPPSHQWY |
| D200N | TVLDLKDAFFCLRLHPTSQPLFAFEWRDPEMGISGQLTWTRLPQGFKN |
| H204R | SPALFNEALRRDLADFRIQHPDLILLQYVDDLLLAATSELDCQQGTRAL |
| E302K | LQTLGNLGYRASAKKAQICQKQVKYLGYLLKEGQRWLTEARKETVM |
| F309N | GQPTPKTPRQLRKFLGTAGNCRLFIPGFAEMAAPLYPLTKPGTLFNWGP |
| W313F | DQQKAYQEIKQALLTAPALGLPDLTKPFELFVDEKQGYAKGVLTQKLG |
| T330P | PWRRPVAYLSKKLDPVAAGWPPCLRMVAAIAVLTKDAGKLTMGQPLVI |
| L345G | GAPHAVEALVKQPPDRWLSKARMTHYQALLLDTDRVQFGPVVALNPA |
| N454K | TLLPLPEEGLQHNCLDILAEAHGTRPDLTDQPLPDADHTWYTGGSSLL |
| D524G | QEGQRKAGAAVTTETEVIWAKALPAGTSAQRAELIALTQALKMAEGK |
| D583N | KLNVYTNSRYAFATAHIQGEIYRRRGLLTSEGKEIKNKDEILALLKALFL |
| H594Q | PKRLSIIHCPGHQKGHSAEARGNRMANQAARKAAITETPDTSTLLIENS |
| D653N | SP(SEQ ID NO: 121) |
| M-MLV RT | TLNIEDEYRLHETSKEPDVSLGSTWLSDFPQAWAETGGMGLAVRQAPL |
| D200N | IIPLKATSTPVSIKQYPMSQEARLGIKPHIQRLLDQGILVPCQSPWNTPLL |
| T330P | PVKKPGTNDYRPVQDLREVNKRVEDIHPTVPNPYNLLSGLPPSHQWYT |
| L603W | VLDLKDAFFCLRLHPTSQPLFAFEWRDPEMGISGQLTWTRLPQGFKNSP |
| T306K | TLFNEALHRDLADFRIQHPDLILLQYVDDLLLAATSELDCQQGTRALLQ |
| W313F | TLGNLGYRASAKKAQICQKQVKYLGYLLKEGQRWLTEARKETVMGQ |
| IN PE2 | PTPKTPRQLREFLGKAGFCRLFIPGFAEMAAPLYPLTKPGTLFNWGPDQ |
| | QKAYQEIKQALLTAPALGLPDLTKPFELFVDEKQGYAKGVLTQKLGPW |
| | RRPVAYLSKKLDPVAAGWPPCLRMVAAIAVLTKDAGKLTMGQPLVILA |
| | PHAVEALVKQPPDRWLSNARMTHYQALLLDTDRVQFGPVVALNPATLL |
| | PLPEEGLQHNCLDILAEAHGTRPDLTDQPLPDADHTWYTDGSSLLQEG |
| | QRKAGAAVTTETEVIWAKALPAGTSAQRAELIALTQALKMAEGKKLN |
| | VYTDSRYAFATAHIHGEIYRRRGWLTSEGKEIKNKDEILALLKALFLPKR |
| | LSIIHCPGHQKGHSAEARGNRMADQAARKAAITETPDTSTLLIENSSP |
| | (SEQ ID NO: 122) |

[0508] The prime editor (PE) system described here contemplates any publicly-available reverse transcriptase described or disclosed in any of the following U.S. patents (each of which are incorporated by reference in their entireties): U.S. Pat. Nos. 10,202,658; 10,189,831; 10,150,955; 9,932,567; 9,783,791; 9,580,698; 9,534,201; and 9,458,484, and any variant thereof that can be made using known methods for installing mutations, or known methods for evolving proteins. The following references describe reverse transcriptases in art. Each of their disclosures are incorporated herein by reference in their entireties.

[0509] Herzig, E., Voronin, N., Kucherenko, N. & Hizi, A. A Novel Leu92 Mutant of HIV-1 Reverse Transcriptase with a Selective Deficiency in Strand Transfer Causes a Loss of Viral Replication. J. Virol. 89, 8119-8129 (2015).

[0510] Mohr, G. et al. A Reverse Transcriptase-Cas1 Fusion Protein Contains a Cas6 Domain Required for Both CRISPR RNA Biogenesis and RNA Spacer Acquisition. Mol. Cell 72, 700-714.e8 (2018).

[0511] Zhao, C., Liu, F. & Pyle, A. M. An ultraprocessive, accurate reverse transcriptase encoded by a metazoan group II intron. RNA 24, 183-195 (2018).

[0512] Zimmerly, S. & Wu, L. An Unexplored Diversity of Reverse Transcriptases in Bacteria. Microbiol Spectr 3, MDNA3-0058-2014 (2015).

[0513] Ostertag, E. M. & Kazazian Jr, H. H. Biology of Mammalian L1 Retrotransposons. Annual Review of Genetics 35, 501-538 (2001).

[0514] Perach, M. & Hizi, A. Catalytic Features of the Recombinant Reverse Transcriptase of Bovine Leukemia Virus Expressed in Bacteria. Virology 259, 176-189 (1999).

[0515] Lim, D. et al. Crystal structure of the moloney murine leukemia virus RNase H domain. J. Virol. 80, 8379-8389 (2006).

[0516] Zhao, C. & Pyle, A. M. Crystal structures of a group II intron maturase reveal a missing link in spliceosome evolution. Nature Structural & Molecular Biology 23, 558-565 (2016).

[0517] Griffiths, D. J. Endogenous retroviruses in the human genome sequence. Genome Biol. 2, REVIEWS1017 (2001).

[0518] Baranauskas, A. et al. Generation and characterization of new highly thermostable and processive M-MuLV reverse transcriptase variants. Protein Eng Des Sel 25, 657-668 (2012).

[0519] Zimmerly, S., Guo, H., Perlman, P. S. & Lambowltz, A. M. Group II intron mobility occurs by target DNA-primed reverse transcription. Cell 82, 545-554 (1995).

[0520] Feng, Q., Moran, J. V., Kazazian, H. H. & Boeke, J. D. Human L1 retrotransposon encodes a conserved endonuclease required for retrotransposition. Cell 87, 905-916 (1996).

[0521] Berkhout, B., Jebbink, M. & Zsíros, J. Identification of an Active Reverse Transcriptase Enzyme Encoded by a Human Endogenous HERV-K Retrovirus. Journal of Virology 73,2365-2375 (1999).

[0522] Kotewicz, M. L., Sampson, C. M., D'Alessio, J. M. & Gerard, G. F. Isolation of cloned Moloney murine leukemia virus reverse transcriptase lacking ribonuclease H activity. Nucleic Acids Res 16, 265-277 (1988).

[0523] Arezi, B. & Hogrefe, H. Novel mutations in Moloney Murine Leukemia Virus reverse transcriptase increase thermostability through tighter binding to template-primer. Nucleic Acids Res 37,473-481 (2009).

[0524] Blain, S. W. & Goff, S. P. Nuclease activities of Moloney murine leukemia virus reverse transcriptase. Mutants with altered substrate specificities. J. Biol. Chem. 268, 23585-23592 (1993).

[0525] Xiong, Y. & Eickbush, T. H. Origin and evolution of retroelements based upon their reverse transcriptase sequences. EMBO J 9, 3353-3362 (1990).

[0526] Herschhorn, A. & Hizi, A. Retroviral reverse transcriptases. Cell. Mol. Life Sci. 67, 2717-2747 (2010).

[0527] Taube, R., Loya, S., Avidan, O., Perach, M. & Hizi, A. Reverse transcriptase of mouse mammary tumour virus: expression in bacteria, purification and biochemical characterization. Biochem. J. 329 (Pt 3), 579-587 (1998).

[0528] Liu, M. et al. Reverse Transcriptase-Mediated Tropism Switching in Bordetella Bacteriophage. Science 295, 2091-2094 (2002).

[0529] Luan, D. D., Korman, M. H., Jakubczak, J. L. & Eickbush, T. H. Reverse transcription of R2Bm RNA is primed by a nick at the chromosomal target site: a mechanism for non-LTR retrotransposition. Cell 72, 595-605 (1993).

[0530] Nottingham, R. M. et al. RNA-seq of human reference RNA samples using a thermostable group II intron reverse transcriptase. RNA 22, 597-613 (2016).

[0531] Telesnitsky, A. & Goff, S. P. RNase H domain mutations affect the interaction between Moloney murine leukemia virus reverse transcriptase and its primer-template. Proc. Natl. Acad. Sci. U.S.A. 90, 1276-1280 (1993).

[0532] Halvas, E. K., Svarovskaia, E. S. & Pathak, V. K. Role of Murine Leukemia Virus Reverse Transcriptase Deoxyribonucleoside Triphosphate-Binding Site in Retroviral Replication and In Vivo Fidelity. Journal of Virology 74, 10349-10358 (2000).

[0533] Nowak, E. et al. Structural analysis of monomeric retroviral reverse transcriptase in complex with an RNA/DNA hybrid. Nucleic Acids Res 41, 3874-3887 (2013).

[0534] Stamos, J. L., Lentzsch, A. M. & Lambowitz, A. M. Structure of a Thermostable Group II Intron Reverse Transcriptase with Template-Primer and Its Functional and Evolutionary Implications. Molecular Cell 68, 926-939.e4 (2017).

[0535] Das, D. & Georgiadis, M. M. The Crystal Structure of the Monomeric Reverse Transcriptase from Moloney Murine Leukemia Virus. Structure 12, 819-829 (2004).

[0536] Avidan, O., Meer, M. E., Oz, I. & Hizi, A. The processivity and fidelity of DNA synthesis exhibited by the reverse transcriptase of bovine leukemia virus. European Journal of Biochemistry 269, 859-867 (2002).

[0537] Gerard, G. F. et al. The role of template-primer in protection of reverse transcriptase from thermal inactivation. Nucleic Acids Res 30, 3118-3129 (2002).

[0538] Monot, C. et al. The Specificity and Flexibility of L1 Reverse Transcription Priming at Imperfect T-Tracts. PLOS Genetics 9, e1003499 (2013).

[0539] Mohr, S. et al. Thermostable group II intron reverse transcriptase fusion proteins and their use in cDNA synthesis and next-generation RNA sequencing. RNA 19, 958-970 (2013).

[0540] Any of the references noted above which relate to reverse transriptases are hereby incorporated by reference in their entireties, if not already stated so.

### PE Fusion Proteins

[0541] The prime editor (PE) system described herein contemplate fusion proteins comprising a napDNAbp and a polymerase (e.g., DNA-dependent DNA polymerase or RNA-dependent DNA polymerase, such as, reverse transcriptase), and optionally joined by a linker. The application contemplates any suitable napDNAbp and polymerase (e.g., DNA-dependent DNA polymerase or RNA-dependent DNA polymerase, such as, reverse transcriptase) to be combined in a single fusion protein. Examples of napDNAbps and polymerases (e.g., DNA-dependent DNA polymerase or RNA-dependent DNA polymerase, such as, reverse transcriptase) are each defined herein. Since polymerases are well-known in the art, and the amino acid sequences are readily available, this disclosure is not meant in any way to be limited to those specific polymerases identified herein.

[0542] In various embodiments, the fusion proteins may comprise any suitable structural configuration. For example, the fusion protein may comprise from the N-terminus to the C-terminus direction, a napDNAbp fused to a polymerase (e.g., DNA-dependent DNA polymerase or RNA-dependent DNA polymerase, such as, reverse transcriptase). In other embodiments, the fusion protein may comprise from the N-terminus to the C-terminus direction, a polymerase (e.g., a reverse transcriptase) fused to a napDNAbp. The fused domain may optionally be joined by a linker, e.g., an amino acid sequence. In other embodiments, the fusion proteins may comprise the structure NH₂-[napDNAbp]-[polymerase]-COOH; or NH₂-[polymerase][napDNAbp]-COOH, wherein each instance of “]-[” indicates the presence of an optional linker sequence. In embodiments wherein the polymerase is a reverse transcriptase, the fusion proteins may comprise the structure NH₂-[napDNAbp]-[RT]-COOH; or NH₂-[RT][napDNAbp]-COOH, wherein each instance of “]-[” indicates the presence of an optional linker sequence.

[0543] An exemplary fusion protein is depicted in FIG. 14, which shows a fusion protein comprising an MLV reverse transcriptase (“MLV-RT”) fused to a nickase Cas9 (“Cas9(H840A)”) via a linker sequence. This example is not intended to limit scope of fusion proteins that may be utilized for the prime editor (PE) system described herein.

[0544] In various embodiments, the prime editor fusion protein may have the following amino acid sequence (referred to herein as “PE1”), which includes a Cas9 variant comprising an H840A mutation (i.e., a Cas9 nickase) and an M-MLV RT wild type, as well as an N-terminal NLS sequence (19 amino acids) and an amino acid linker (32 amino acids) that joins the C-terminus of the Cas9 nickase domain to the N-terminus of the RT domain. The PE1 fusion protein has the following structure: [NLS]-[Cas9(H840A)]-[linker]-[MMLV_RT(wt)]. The amino acid sequence of PE1 and its individual components are as follows:

| DESCRIPTION | SEQUENCE |
|---|---|
| PE1 FUSION | MKRTADGSEFESPKKKRKVDKKYSIGLDIGTNSVGWAVITDEYKVPS |
| PROTEIN | KKFKVLGNTDRHSIKKNLIGALLFDSGETAEATRLKRTARRRYTRR |
| CAS9 | KNRICYLQEIFSNEMAKVDDSFFHRLEESFLVEEDKKHERHPIFGNI |
| (H840A)- | VDEVAYHEKYPTIYHLRKKLVDSTDKADLRLIYLALAHMIKFRGHF |
| MMLV_RT | LIEGDLNPDNSDVDKLFIQLVQTYNQLFEENPINASGVDAKAILSAR |
| (WT) | LSKSRRLENLIAQLPGEKKNGLFGNLIALSLGLTPNFKSNFDLAEDA |
| | KLQLSKDTYDDDLDNLLAQIGDQYADLFLAAKNLSDAILLSDILRV |
| | NTEITKAPLSASMIKRYDEHHQDLTLLKALVRQQLPEKYKEIFFDQ |
| | SKNGYAGYIDGGASQEEFYKFIKPILEKMDGTEELLVKLNREDLLR |
| | KQRTFDNGSIPHQIHLGELHAILRRQEDFYPFLKDNREKIEKILTFR |
| | IPYYVGPLARGNSRFAWMTRKSEETITPWNFEEVVDKGASAQSFIE |
| | RMTNFDKNLPNEKVLPKHSLLYEYFTVYNELTKVKYVTEGMRKPA |
| | FLSGEQKKAIVDLLFKTNRKVTVKQLKEDYFKKIECFDSVEISGVE |
| | DRFNASLGTYHDLLKIIKDKDFLDNEENEDILEDIVLTLTLFEDREM |
| | IEERLKTYAHLFDDKVMKQLKRRRYTGWGRLSRKLINGIRDKQSG |
| | KTILDFLKSDGFANRNFMQLIHDDSLTFKEDIQKAQVSGQGDSLHE |
| | HIANLAGSPAIKKGILQTVKVVDELVKVMGRHKPENIVIEMARENQ |
| | TTQKGQKNSRERMKRIEEGIKELGSQILKEHPVENTQLQNEKLYL |
| | YYLQNGRDMYVDQELDINRLSDYDVDAIVPQSFLKDDSIDNKVLTR |
| | SDKNRGKSDNVPSEEVVKKMKNYWRQLLNAKLITQRKFDNLTKA |
| | ERGGLSELDKAGFIKRQLVETRQITKHVAQILDSRMNTKYDENDK |
| | LIREVKVITLKSKLVSDFRKDFQFYKVREINNYHHAHDAYLNAVVG |
| | TALIKKYPKLESEFVYGDYKVYDVRKMIAKSEQEIGKATAKYFFYS |
| | NIMNFFKTEITLANGEIRKRPLIETNGETGEIVWDKGRDFATVRKV |
| | LSMPQVNIVKKTEVQTGGFSKESILPKRNSDKLIARKKDWDPKKY |
| | GGFDSPTVAYSVLVVAKVEKGKSKKLKSVKELLGITIMERSSFEKNP |
| | IDFLEAKGYKEVKKDLIIKLPKYSLFELENGRKRMLASAGELQKG |
| | NELALPSKYVNFLYLASHYEKLKGSPEDNEQKQLFVEQHKHYLDE |
| | IIEQISEFSKRVILADANLDKVLSAYNKHRDKPIREQAENIIHLFTLT |
| | NLGAPAAFKYFDTTIDRKRYTSTKEVLDATLIHQSITGLYETRIDLS |
| | QLGGDSGGSSGGSSGSETPGTSESATPESSGGSSGGSSTLNIEDEYRLH |
| | ETSKEPDVSLGSTWLSDFPQAWAETGGMGLAVRQAPLIIPLKATSTPVSIKQ |
| | YPMSQEARLGIKPHIQRLLDQGILVPCQSPWNTPLLPVKKPGTNDYRPVQD |
| | LREVNKRVEDIHPTVPNPYNLLSGLPPSHQWYTVLDLKDAFFCLRLHPTSQ |
| | PLFAFEWRDPEMGISGQLTWTRLPQGFKNSPTLFDEALHRDLADFRIQHP |
| | DLILLQYVDDLLLAATSELDCQQGTRALLQTLGNLGYRASAKKAQICQKQV |
| | KYLGYLLKEGQRWLTEARKETVMGQPTPKTPRQLREFLGTAGFCRLWIPG |
| | FAEMAAPLYPLTKTGTLFNWGPDQQKAYQEIKQALLTAPALGLPDLTKPFE |
| | LFVDEKQGYAKGVLTQKLGPWRRPVAYLSKKLDPVAAGWPPCLRMVAAIAV |
| | LTKDAGKLTMGQPLVILAPHAVEALVKQPPDRWLSNARMTHYQALLLDTD |
| | RVQFGPVVALNPATLLPLPEEGLQHNCLDILAEAHGTRPDLTDQPLPDADH |
| | TWYTDGSSLLQEGQRKAGAAVTTETEVIWAKALPAGTSAQRAELIALTQALK |
| | MAEGKKLNVYTDSRYAFATAHIHGEIYRRRGLLTSEGKEIKNKDEILALLKAL |
| | FLPKRLSIIHCPGHQKGHSAEARGNRMADQAARKAAITETPDTSTLLIENSS |
| | PSGGSKRTADGSEFEPKKKRKV (SEQ ID NO: 123) |
| | KEY: |
| | NUCLEAR LOCALIZATION SEQUENCE (NLS) TOP:(SEQ ID NO: 124), |
| | BOTTOM: (SEQ ID NO: 133) |
| | CAS9(H840A) (SEQ ID NO: 126) |
| | 33-AMINO ACID LINKER (SEQ ID NO: 127) |
| | M-MLV REVERSE TRANSCRIPTASE (SEQ ID NO: 128) |
| PE1-N- | MKRTADGSEFESPKKKRKV (SEQ ID NO: 124) |
| TERMINAL | |
| NLS | |
| PE1-CAS9 | DKKYSIGLDIGTNSVGWAVITDEYKVPSKKFKVLGNTDRHSIKKNLIGA |
| (H840A) | LLFDSGETAEATRLKRTARRRYTRRKNRICYLQEIFSNEMAKVDDSFFH |
| (MET | RLEESFLVEEDKKHERHPIFGNIVDEVAYHEKYPTIYHLRKKLVDSTDK |
| MINUS) | ADLRLIYLALAHMIKFRGHFLIEGDLNPDNSDVDKLFIQLVQTYNQLFE |
| | ENPINASGVDAKAILSARLSKSRRLENLIAQLPGEKKNGLFGNLIALSLG |
| | LTPNFKSNFDLAEDAKLQLSKDTYDDDLDNLLAQIGDQYADLFLAAKN |
| | LSDAILLSDILRVNTEITKAPLSASMIKRYDEHHQDLTLLKALVRQQLPE |
| | KYKEIFFDQSKNGYAGYIDGGASQEEFYKFIKPILEKMDGTEELLVKLN |
| | REDLLRKQRTFDNGSIPHQIHLGELHAILRRQEDFYPFLKDNREKIEKIL |
| | TFRIPYYVGPLARGNSRFAWMTRKSEETITPWNFEEVVDKGASAQSFIE |
| | RMTNFDKNLPNEKVLPKHSLLYEYFTVYNELTKVKYVTEGMRKPAFLS |
| | GEQKKAIVDLLFKTNRKVTVKQLKEDYFKKIECFDSVEISGVEDRFNA |
| | SLGTYHDLLKIIKDKDFLDNEENEDILEDIVLTLTLFEDREMIEERLKTY |
| | AHLFDDKVMKQLKRRRYTGWGRLSRKLINGIRDKQSGKTILDFLKSD |
| | GFANRNFMQLIHDDSLTFKEDIQKAQVSGQGDSLHEHIANLAGSPAIKK |
| | GILQTVKVVDELVKVMGRHKPENIVIEMARENQTTQKGQKNSRERMK |
| | RIEEGIKELGSQILKEHPVENTQLQNEKLYLYYLQNGRDMYVDQELDIN |
| | RLSDYDVDAIVPQSFLKDDSIDNKVLTRSDKNRGKSDNVPSEEVVKKM |
| | KNYWRQLLNAKLITQRKFDNLTKAERGGLSELDKAGFIKRQLVETRQI |
| | TKHVAQILDSRMNTKYDENDKLIREVKVITLKSKLVSDFRKDFQFYKV |
| | REINNYHHAHDAYLNAVVGTALIKKYPKLESEFVYGDYKVYDVRKMI |
| | AKSEQEIGKATAKYFFYSNIMNFFKTEITLANGEIRKRPLIETNGETGEIV |
| | WDKGRDFATVRKVLSMPQVNIVKKTEVQTGGFSKESILPKRNSDKLIA |
| | RKKDWDPKKYGGFDSPTVAYSVLVVAKVEKGKSKKLKSVKELLGITIM |
| | ERSSFEKNPIDFLEAKGYKEVKKDLIIKLPKYSLFELENGRKRMLASAG |
| | ELQKGNELALPSKYVNFLYLASHYEKLKGSPEDNEQKQLFVEQHKHY |
| | LDEIIEQISEFSKRVILADANLDKVLSAYNKHRDKPIREQAENIIHLFTLT |
| | NLGAPAAFKYFDTTIDRKRYTSTKEVLDATLIHQSITGLYETRIDLSQLG |
| | GD (SEQ ID NO: 130) |
| PE1- | SGGSSGGSSGSETPGTSESATPESSGGSSGGSS (SEQ ID NO: 127) |
| LINKER | |
| BETWEEN | |
| CAS9 | |
| DOMAIN | |
| AND RT | |
| DOMAIN (33 | |
| AMINO | |
| ACIDS) | |
| PE1-M- | TLNIEDEYRLHETSKEPDVSLGSTWLSDFPQAWAETGGMGLAVRQAPL |
| MLV RT | IIPLKATSTPVSIKQYPMSQEARLGIKPHIQRLLDQGILVPCQSPWNTPLL |
| | PVKKPGTNDYRPVQDLREVNKRVEDIHPTVPNPYNLLSGLPPSHQWYT |
| | VLDLKDAFFCLRLHPTSQPLFAFEWRDPEMGISGQLTWTRLPQGFKNSP |
| | TLFDEALHRDLADFRIQHPDLILLQYVDDLLLAATSELDCQQGTRALLQ |
| | TLGNLGYRASAKKAQICQKQVKYLGYLLKEGQRWLTEARKETVMGQ |
| | PTPKTPRQLREFLGTAGFCRLWIPGFAEMAAPLYPLTKTGTLFNWGPDQ |
| | QKAYQEIKQALLTAPALGLPDLTKPFELFVDEKQGYAKGVLTQKLGPW |
| | RRPVAYLSKKLDPVAAGWPPCLRMVAAIAVLTKDAGKLTMGQPLVILA |
| | PHAVEALVKQPPDRWLSNARMTHYQALLLDTDRVQFGPVVALNPATLL |
| | PLPEEGLQHNCLDILAEAHGTRPDLTDQPLPDADHTWYTDGSSLLQEG |
| | QRKAGAAVTTETEVIWAKALPAGTSAQRAELIALTQALKMAEGKKLN |
| | VYTDSRYAFATAHIHGEIYRRRGLLTSEGKEIKNKDEILALLKALFLPKR |
| | LSIIHCPGHQKGHSAEARGNRMADQAARKAAITETPDTSTLLIENSSP |
| | (SEQ ID NO: 132) |
| PE1-C- | SGGSKRTADGSEFEPKKKRKV (SEQ ID NO: 133) |
| TERMINAL | |
| NLS | |

[0545] In another embodiment, the prime editor fusion protein may have the following amino acid sequence (referred to herein as “PE2”), which includes a Cas9 variant comprising an H840A mutation (i.e., a Cas9 nickase) and an M-MLV RT comprising mutations D200N, T330P, L603W, T306K, and W313F, as well as an N-terminal NLS sequence (19 amino acids) and an amino acid linker (33 amino acids) that joins the C-terminus of the Cas9 nickase domain to the N-terminus of the RT domain. The PE2 fusion protein has the following structure: [NLS]-[Cas9(H840A)]-[linker]-[MMLV_RT(D200N)(T330P)(L603W)(T306K)(W313F)]. The amino acid sequence of PE2 is as follows:

PE2 FUSION PROTEIN
CAS9(H840A)-MMLV_RT D200N T330P L603W T306K W313F
(SEQ ID NO: 134)
MKRTADGSEFESPKKKRKVDKKYSIGLDIGTNSVGWAVITDEYKVPS
KKFKVLGNTDRHSIKKNLIGALLFDSGETAEATRLKRTARRRYTRR
KNRICYLQEIFSNEMAKVDDSFFHRLEESFLVEEDKKHERHPIFGNI
VDEVAYHEKYPTIYHLRKKLVDSTDKADLRLIYLALAHMIKFRGHF
LIEGDLNPDNSDVDKLFIQLVQTYNQLFEENPINASGVDAKAILSAR
LSKSRRLENLIAQLPGEKKNGLFGNLIALSLGLTPNFKSNFDLAEDA
KLQLSKDTYDDDLDNLLAQIGDQYADLFLAAKNLSDAILLSDILRV
NTEITKAPLSASMIKRYDEHHQDLTLLKALVRQQLPEKYKEIFFDQ
SKNGYAGYIDGGASQEEFYKFIKPILEKMDGTEELLVKLNREDLLR
KQRTFDNGSIPHQIHLGELHAILRRQEDFYPFLKDNREKIEKILTFR
IPYYVGPLARGNSRFAWMTRKSEETITPWNFEEVVDKGASAQSFIE
RMTNFDKNLPNEKVLPKHSLLYEYFTVYNELTKVKYVTEGMRKPA
FLSGEQKKAIVDLLFKTNRKVTVKQLKEDYFKKIECFDSVEISGVE
DRFNASLGTYHDLLKIIKDKDFLDNEENEDILEDIVLTLTLFEDREM
IEERLKTYAHLFDDKVMKQLKRRRYTGWGRLSRKLINGIRDKQSG
KTILDFLKSDGFANRNFMQLIHDDSLTFKEDIQKAQVSGQGDSLHE
HIANLAGSPAIKKGILQTVKVVDELVKVMGRHKPENIVIEMARENQ
TTQKGQKNSRERMKRIEEGIKELGSQILKEHPVENTQLQNEKLYL
YYLQNGRDMYVDQELDINRLSDYDVDAIVPQSFLKDDSIDNKVLTR
SDKNRGKSDNVPSEEVVKKMKNYWRQLLNAKLITQRKFDNLTKA
ERGGLSELDKAGFIKRQLVETRQITKHVAQILDSRMNTKYDENDK
LIREVKVITLKSKLVSDFRKDFQFYKVREINNYHHAHDAYLNAVVG
TALIKKYPKLESEFVYGDYKVYDVRKMIAKSEQEIGKATAKYFFYS
NIMNFFKTEITLANGEIRKRPLIETNGETGEIVWDKGRDFATVRKV
LSMPQVNIVKKTEVQTGGFSKESILPKRNSDKLIARKKDWDPKKY
GGFDSPTVAYSVLVVAKVEKGKSKKLKSVKELLGITIMERSSFEKNP
IDFLEAKGYKEVKKDLIIKLPKYSLFELENGRKRMLASAGELQKG
NELALPSKYVNFLYLASHYEKLKGSPEDNEQKQLFVEQHKHYLDE
IIEQISEFSKRVILADANLDKVLSAYNKHRDKPIREQAENIIHLFTLT
NLGAPAAFKYFDTTIDRKRYTSTKEVLDATLIHQSITGLYETRIDLS
QLGGDSGGSSGGSSGSETPGTSESATPESSGGSSGGSSTLNIEDEYRLH
ETSKEPDVSLGSTWLSDFPQAWAETGGMGLAVRQAPLIIPLKATSTPVSI
KQYPMSQEARLGIKPHIQRLLDQGILVPCQSPWNTPLLPVKKPGTNDYRP
VQDLREVNKRVEDIHPTVPNPYNLLSGLPPSHQWYTVLDLKDAFFCLRLH
PTSQPLFAFEWRDPEMGISGQLTWTRLPQGFKNSPTLFNEALHRDLADFR
IQHPDLILLQYVDDLLLAATSELDCQQGTRALLQTLGNLGYRASAKKAQI
CQKQVKYLGYLLKEGQRWLTEARKETVMGQPTPKTPRQLREFLGKAGFCR
LFIPGFAEMAAPLYPLTKPGTLFNWGPDQQKAYQEIKQALLTAPALGLPD
LTKPFELFVDEKQGYAKGVLTQKLGPWRRPVAYLSKKLDPVAAGWPPCLR
MVAAIAVLTKDAGKLTMGQPLVILAPHAVEALVKQPPDRWLSNARMTHYQ
ALLLDTDRVQFGPVVALNPATLLPLPEEGLQHNCLDILAEAHGTRPDLTD
QPLPDADHTWYTDGSSLLQEGQRKAGAAVTTETEVIWAKALPAGTSAQRA
ELIALTQALKMAEGKKLNVYTDSRYAFATAHIHGEIYRRRGWLTSEGKEI
KNKDEILALLKALFLPKRLSIIHCPGHQKGHSAEARGNRMADQAARKAAI
TETPDTSTLLIENSSPSGGSKRTADGSEFEPKKKRKV
KEY:
NUCLEAR LOCALIZATION SEQUENCE (NLS)
TOP:(SEQ ID NO: 124),
BOTTOM: (SEQ ID NO: 133)
CAS9(H840A) (SEQ ID NO: 137)
33-AMINO ACID LINKER (SEQ ID NO: 127)
M-MLV REVERSE TRANSCRIPTASE (SEQ ID NO: 139)
PE2-N-TERMINAL NLS
(SEQ ID NO: 124)
MKRTADGSEFESPKKKRKV
PE2-CAS9 (H840A) (MET MINUS)
(SEQ ID NO: 141)
DKKYSIGLDIGTNSVGWAVITDEYKVPSKKFKVLGNTDRHSIKKNLIGA
LLFDSGETAEATRLKRTARRRYTRRKNRICYLQEIFSNEMAKVDDSFFH
RLEESFLVEEDKKHERHPIFGNIVDEVAYHEKYPTIYHLRKKLVDSTDK
ADLRLIYLALAHMIKFRGHFLIEGDLNPDNSDVDKLFIQLVQTYNQLFE
ENPINASGVDAKAILSARLSKSRRLENLIAQLPGEKKNGLFGNLIALSLG
LTPNFKSNFDLAEDAKLQLSKDTYDDDLDNLLAQIGDQYADLFLAAKN
LSDAILLSDILRVNTEITKAPLSASMIKRYDEHHQDLTLLKALVRQQLPE
KYKEIFFDQSKNGYAGYIDGGASQEEFYKFIKPILEKMDGTEELLVKLN
REDLLRKQRTFDNGSIPHQIHLGELHAILRRQEDFYPFLKDNREKIEKIL
TFRIPYYVGPLARGNSRFAWMTRKSEETITPWNFEEVVDKGASAQSFIE
RMTNFDKNLPNEKVLPKHSLLYEYFTVYNELTKVKYVTEGMRKPAFLS
GEQKKAIVDLLFKTNRKVTVKQLKEDYFKKIECFDSVEISGVEDRFNA
SLGTYHDLLKIIKDKDFLDNEENEDILEDIVLTLTLFEDREMIEERLKT
YAHLFDDKVMKQLKRRRYTGWGRLSRKLINGIRDKQSGKTILDFLKSD
GFANRNFMQLIHDDSLTFKEDIQKAQVSGQGDSLHEHIANLAGSPAIKK
GILQTVKVVDELVKVMGRHKPENIVIEMARENQTTQKGQKNSRERMK
RIEEGIKELGSQILKEHPVENTQLQNEKLYLYYLQNGRDMYVDQELDIN
RLSDYDVDAIVPQSFLKDDSIDNKVLTRSDKNRGKSDNVPSEEVVKKM
KNYWRQLLNAKLITQRKFDNLTKAERGGLSELDKAGFIKRQLVETRQI
TKHVAQILDSRMNTKYDENDKLIREVKVITLKSKLVSDFRKDFQFYKV
REINNYHHAHDAYLNAVVGTALIKKYPKLESEFVYGDYKVYDVRKMI
AKSEQEIGKATAKYFFYSNIMNFFKTEITLANGEIRKRPLIETNGETGEI
VWDKGRDFATVRKVLSMPQVNIVKKTEVQTGGFSKESILPKRNSDKLIA
RKKDWDPKKYGGFDSPTVAYSVLVVAKVEKGKSKKLKSVKELLGITIM
ERSSFEKNPIDFLEAKGYKEVKKDLIIKLPKYSLFELENGRKRMLASAG
ELQKGNELALPSKYVNFLYLASHYEKLKGSPEDNEQKQLFVEQHKHY
LDEIIEQISEFSKRVILADANLDKVLSAYNKHRDKPIREQAENIIHLFTL
TNLGAPAAFKYFDTTIDRKRYTSTKEVLDATLIHQSITGLYETRIDLSQL
GGD
PE2-LINKER BETWEEN CAS9 DOMAIN AND RT DOMAIN (33
AMINO ACIDS)
(SEQ ID NO: 127)
SGGSSGGSSGSETPGTSESATPESSGGSSGGSS
PE2-MMLV_RT D200N T330P L603W T306K W313F
(SEQ ID NO: 143)
TLNIEDEYRLHETSKEPDVSLGSTWLSDFPQAWAETGGMGLAVRQAPL
IIPLKATSTPVSIKQYPMSQEARLGIKPHIQRLLDQGILVPCQSPWNTPL
LPVKKPGTNDYRPVQDLREVNKRVEDIHPTVPNPYNLLSGLPPSHQWYT
VLDLKDAFFCLRLHPTSQPLFAFEWRDPEMGISGQLTWTRLPQGFKNSP
TLFNEALHRDLADFRIQHPDLILLQYVDDLLLAATSELDCQQGTRALLQ
TLGNLGYRASAKKAQICQKQVKYLGYLLKEGQRWLTEARKETVMGQ
PTPKTPRQLREFLGKAGFCRLFIPGFAEMAAPLYPLTKPGTLFNWGPDQ
QKAYQEIKQALLTAPALGLPDLTKPFELFVDEKQGYAKGVLTQKLGPW
RRPVAYLSKKLDPVAAGWPPCLRMVAAIAVLTKDAGKLTMGQPLVILA
PHAVEALVKQPPDRWLSNARMTHYQALLLDTDRVQFGPVVALNPATLL
PLPEEGLQHNCLDILAEAHGTRPDLTDQPLPDADHTWYTDGSSLLQEG
QRKAGAAVTTETEVIWAKALPAGTSAQRAELIALTQALKMAEGKKLN
VYTDSRYAFATAHIHGEIYRRRGWLTSEGKEIKNKDEILALLKALFLPK
RLSIIHCPGHQKGHSAEARGNRMADQAARKAAITETPDTSTLLIENSSP
PE2-C-TERMINAL NLS
(SEQ ID NO: 133)
SGGSKRTADGSEFEPKKKRKV

[0546] In still other embodiments, the prime editor fusion protein may have the following amino acid sequences:

PE FUSION PROTEIN MMLV_RT (WT)32AA-CAS9(H840A)
(SEQ ID NO: 145)
MKRTADGSEFESPKKKRKVTLNIEDEYRLHETSKEPDVSLGSTWLSDFPQ
AWAETGGMGLAVRQAPLIIPLKATSTPVSIKQYPMSQEARLGIKPHIQRL
LDQGILVPCQSPWNTPLLPVKKPGTNDYRPVQDLREVNKRVEDIHPTVPN
PYNLLSGLPPSHQWYTVLDLKDAFFCLRLHPTSQPLFAFEWRDPEMGISG
QLTWTRLPQGFKNSPTLFDEALHRDLADFRIQHPDLILLQYVDDLLLAAT
SELDCQQGTRALLQTLGNLGYRASAKKAQICQKQVKYLGYLLKEGQRWLT
EARKETVMGQPTPKTPRQLREFLGTAGFCRLWIPGFAEMAAPLYPLTKTG
TLFNWGPDQQKAYQEIKQALLTAPALGLPDLTKPFELFVDEKQGYAKGVL
TQKLGPWRRPVAYLSKKLDPVAAGWPPCLRMVAAIAVLTKDAGKLTMGQP
LVILAPHAVEALVKQPPDRWLSNARMTHYQALLLDTDRVQFGPVVALNPA
TLLPLPEEGLQHNCLDILAEAHGTRPDLTDQPLPDADHTWYTDGSSLLQE
GQRKAGAAVTTETEVIWAKALPAGTSAQRAELIALTQALKMAEGKKLNVY
TDSRYAFATAHIHGEIYRRRGLLTSEGKEIKNKDEILALLKALFLPKRLS
IIHCPGHQKGHSAEARGNRMADQAARKAAITETPDTSTLLIENSSPSGGS
SGGSSGSETPGTSESATPESSGGSSGGSSDKKYSIGLDIGTNSVGWAVIT
DEYKVPSKKFKVLGNTDRHSIKKNLIGALLFDSGETAEATRLKRTARRRY
TRRKNRICYLQEIFSNEMAKVDDSFFHRLEESFLVEEDKKHERHPIFGNI
VDEVAYHEKYPTIYHLRKKLVDSTDKADLRLIYLALAHMIKFRGHFLIEG
DLNPDNSDVDKLFIQLVQTYNQLFEENPINASGVDAKAILSARLSKSR
RLENLIAQLPGEKKNGLFGNLIALSLGLTPNFKSNFDLAEDAKLQL
SKDTYDDDLDNLLAQIGDQYADLFLAAKNLSDAILLSDILRVNTEIT
KAPLSASMIKRYDEHHQDLTLLKALVRQQLPEKYKEIFFDQSKNG
YAGYIDGGASQEEFYKFIKPILEKMDGTEELLVKLNREDLLRKQRT
FDNGSIPHQIHLGELHAILRRQEDFYPFLKDNREKIEKILTFRIPYYV
GPLARGNSRFAWMTRKSEETITPWNFEEVVDKGASAQSFIERMTN
FDKNLPNEKVLPKHSLLYEYFTVYNELTKVKYVTEGMRKPAFLSG
EQKKAIVDLLFKTNRKVTVKQLKEDYFKKIECFDSVEISGVEDRFN
ASLGTYHDLLKIIKDKDFLDNEENEDILEDIVLTLTLFEDREMIEER
LKTYAHLFDDKVMKQLKRRRYTGWGRLSRKLINGIRDKQSGKTIL
DFLKSDGFANRNFMQLIHDDSLTFKEDIQKAQVSGQGDSLHEHIAN
LAGSPAIKKGILQTVKVVDELVKVMGRHKPENIVIEMARENQTTQ
KGQKNSRERMKRIEEGIKELGSQILKEHPVENTQLQNEKLYLYYL
QNGRDMYVDQELDINRLSDYDVDAIVPQSFLKDDSIDNKVLTRSDK
NRGKSDNVPSEEVVKKMKNYWRQLLNAKLITQRKFDNLTKAERG
GLSELDKAGFIKRQLVETRQITKHVAQILDSRMNTKYDENDKLIRE
VKVITLKSKLVSDFRKDFQFYKVREINNYHHAHDAYLNAVVGTALI
KKYPKLESEFVYGDYKVYDVRKMIAKSEQEIGKATAKYFFYSNIM
NFFKTEITLANGEIRKRPLIETNGETGEIVWDKGRDFATVRKVLSM
PQVNIVKKTEVQTGGFSKESILPKRNSDKLIARKKDWDPKKYGGF
DSPTVAYSVLVVAKVEKGKSKKLKSVKELLGITIMERSSFEKNPIDF
LEAKGYKEVKKDLIIKLPKYSLFELENGRKRMLASAGELQKGNEL
ALPSKYVNFLYLASHYEKLKGSPEDNEQKQLFVEQHKHYLDEIIEQ
ISEFSKRVILADANLDKVLSAYNKHRDKPIREQAENIIHLFTLTNLG
APAAFKYFDTTIDRKRYTSTKEVLDATLIHQSITGLYETRIDLSQLG
GDSGGSKRTADGSEFEPKKKRKV
KEY:
NUCLEAR LOCALIZATION SEQUENCE (NLS)
TOP:(SEQ ID NO: 124),
BOTTOM: (SEQ ID NO: 133)
CAS9(H840A) (SEQ ID NO: 147)
33-AMINO ACID LINKER (SEQ ID NO: 127)
M-MLV REVERSE TRANSCRIPTASE (SEQ ID NO: 149)
PE FUSION PROTEIN MMLV_RT (WT)-60AA-CAS9(H840A)
(SEQ ID NO: 150)
MKRTADGSEFESPKKKRKVTLNIEDEYRLHETSKEPDVSLGSTWLSDFPQ
AWAETGGMGLAVRQAPLIIPLKATSTPVSIKQYPMSQEARLGIKPHIQRL
LDQGILVPCQSPWNTPLLPVKKPGTNDYRPVQDLREVNKRVEDIHPTVPN
PYNLLSGLPPSHQWYTVLDLKDAFFCLRLHPTSQPLFAFEWRDPEMGISG
QLTWTRLPQGFKNSPTLFDEALHRDLADFRIQHPDLILLQYVDDLLLAAT
SELDCQQGTRALLQTLGNLGYRASAKKAQICQKQVKYLGYLLKEGQRWLT
EARKETVMGQPTPKTPRQLREFLGTAGFCRLWIPGFAEMAAPLYPLTKTG
TLFNWGPDQQKAYQEIKQALLTAPALGLPDLTKPFELFVDEKQGYAKGVL
TQKLGPWRRPVAYLSKKLDPVAAGWPPCLRMVAAIAVLTKDAGKLTMGQP
LVILAPHAVEALVKQPPDRWLSNARMTHYQALLLDTDRVQFGPVVALNPA
TLLPLPEEGLQHNCLDILAEAHGTRPDLTDQPLPDADHTWYTDGSSLLQE
GQRKAGAAVTTETEVIWAKALPAGTSAQRAELIALTQALKMAEGKKLNVY
TDSRYAFATAHIHGEIYRRRGLLTSEGKEIKNKDEILALLKALFLPKRLS
IIHCPGHQKGHSAEARGNRMADQAARKAAITETPDTSTLLIENSSPSGGS
SGGSSGSETPGTSESATPESAGSYPYDVPDYAGSAAPAAKKKKLDGSGSG
GSSGGSDKKYSIGLDIGTNSVGWAVITDEYKVPSKKFKVLGNTDRHSIKK
NLIGALLFDSGETAEATRLKRTARRRYTRRKNRICYLQEIFSNEMAKVDD
SFFHRLEESFLVEEDKKHERHPIFGNIVDEVAYHEKYPTIYHLRKKLVDS
TDKADLRLIYLALAHMIKFRGHFLIEGDLNPDNSDVDKLFIQLVQTY
NQLFEENPINASGVDAKAILSARLSKSRRLENLIAQLPGEKKNGLF
GNLIALSLGLTPNFKSNFDLAEDAKLQLSKDTYDDDLDNLLAQIGD
QYADLFLAAKNLSDAILLSDILRVNTEITKAPLSASMIKRYDEHHQD
LTLLKALVRQQLPEKYKEIFFDQSKNGYAGYIDGGASQEEFYKFIK
PILEKMDGTEELLVKLNREDLLRKQRTFDNGSIPHQIHLGELHAIL
RRQEDFYPFLKDNREKIEKILTFRIPYYVGPLARGNSRFAWMTRKS
EETITPWNFEEVVDKGASAQSFIERMTNFDKNLPNEKVLPKHSLLY
EYFTVYNELTKVKYVTEGMRKPAFLSGEQKKAIVDLLFKTNRKVT
VKQLKEDYFKKIECFDSVEISGVEDRFNASLGTYHDLLKIIKDKDFL
DNEENEDILEDIVLTLTLFEDREMIEERLKTYAHLFDDKVMKQLKR
RRYTGWGRLSRKLINGIRDKQSGKTILDFLKSDGFANRNFMQLIHD
DSLTFKEDIQKAQVSGQGDSLHEHIANLAGSPAIKKGILQTVKVVD
ELVKVMGRHKPENIVIEMARENQTTQKGQKNSRERMKRIEEGIKE
LGSQILKEHPVENTQLQNEKLYLYYLQNGRDMYVDQELDINRLSD
YDVDAIVPQSFLKDDSIDNKVLTRSDKNRGKSDNVPSEEVVKKMKN
YWRQLLNAKLITQRKFDNLTKAERGGLSELDKAGFIKRQLVETRQ
ITKHVAQILDSRMNTKYDENDKLIREVKVITLKSKLVSDFRKDFQF
YKVREINNYHHAHDAYLNAVVGTALIKKYPKLESEFVYGDYKVYD
VRKMIAKSEQEIGKATAKYFFYSNIMNFFKTEITLANGEIRKRPLIE
TNGETGEIVWDKGRDFATVRKVLSMPQVNIVKKTEVQTGGFSKES
ILPKRNSDKLIARKKDWDPKKYGGFDSPTVAYSVLVVAKVEKGKSK
KLKSVKELLGITIMERSSFEKNPIDFLEAKGYKEVKKDLIIKLPKYS
LFELENGRKRMLASAGELQKGNELALPSKYVNFLYLASHYEKLKG
SPEDNEQKQLFVEQHKHYLDEIIEQISEFSKRVILADANLDKVLSAY
NKHRDKPIREQAENIIHLFTLTNLGAPAAFKYFDTTIDRKRYTSTKE
VLDATLIHQSITGLYETRIDLSQLGGDSGGSKRTADGSEFEPKKKRKV
KEY:
NUCLEAR LOCALIZATION SEQUENCE (NLS)
TOP:(SEQ ID NO: 124),
BOTTOM: (SEQ ID NO: 133)
CAS9(H840A)(SEQ ID NO: 153)
AMINO ACID LINKER (SEQ ID NO: 175)
M-MLV REVERSE TRANSCRIPTASE (SEQ ID NO: 149)
PE FUSION PROTEIN CAS9(H840A)-FEN1-MMLV_RT
D200N T330P L603W T306K W313F
(SEQ ID NO: 154)
MKRTADGSEFESPKKKRKVDKKYSIGLDIGTNSVGWAVITDEYKVPS
KKFKVLGNTDRHSIKKNLIGALLFDSGETAEATRLKRTARRRYTRR
KNRICYLQEIFSNEMAKVDDSFFHRLEESFLVEEDKKHERHPIFGNI
VDEVAYHEKYPTIYHLRKKLVDSTDKADLRLIYLALAHMIKFRGHF
LIEGDLNPDNSDVDKLFIQLVQTYNQLFEENPINASGVDAKAILSAR
LSKSRRLENLIAQLPGEKKNGLFGNLIALSLGLTPNFKSNFDLAEDA
KLQLSKDTYDDDLDNLLAQIGDQYADLFLAAKNLSDAILLSDILRV
NTEITKAPLSASMIKRYDEHHQDLTLLKALVRQQLPEKYKEIFFDQ
SKNGYAGYIDGGASQEEFYKFIKPILEKMDGTEELLVKLNREDLLR
KQRTFDNGSIPHQIHLGELHAILRRQEDFYPFLKDNREKIEKILTFR
IPYYVGPLARGNSRFAWMTRKSEETITPWNFEEVVDKGASAQSFIE
RMTNFDKNLPNEKVLPKHSLLYEYFTVYNELTKVKYVTEGMRKPA
FLSGEQKKAIVDLLFKTNRKVTVKQLKEDYFKKIECFDSVEISGVE
DRFNASLGTYHDLLKIIKDKDFLDNEENEDILEDIVLTLTLFEDREM
IEERLKTYAHLFDDKVMKQLKRRRYTGWGRLSRKLINGIRDKQSG
KTILDFLKSDGFANRNFMQLIHDDSLTFKEDIQKAQVSGQGDSLHE
HIANLAGSPAIKKGILQTVKVVDELVKVMGRHKPENIVIEMARENQ
TTQKGQKNSRERMKRIEEGIKELGSQILKEHPVENTQLQNEKLYL
YYLQNGRDMYVDQELDINRLSDYDVDAIVPQSFLKDDSIDNKVLTR
SDKNRGKSDNVPSEEVVKKMKNYWRQLLNAKLITQRKFDNLTKA
ERGGLSELDKAGFIKRQLVETRQITKHVAQILDSRMNTKYDENDK
LIREVKVITLKSKLVSDFRKDFQFYKVREINNYHHAHDAYLNAVVG
TALIKKYPKLESEFVYGDYKVYDVRKMIAKSEQEIGKATAKYFFYS
NIMNFFKTEITLANGEIRKRPLIETNGETGEIVWDKGRDFATVRKV
LSMPQVNIVKKTEVQTGGFSKESILPKRNSDKLIARKKDWDPKKY
GGFDSPTVAYSVLVVAKVEKGKSKKLKSVKELLGITIMERSSFEKNP
IDFLEAKGYKEVKKDLIIKLPKYSLFELENGRKRMLASAGELQKG
NELALPSKYVNFLYLASHYEKLKGSPEDNEQKQLFVEQHKHYLDE
IIEQISEFSKRVILADANLDKVLSAYNKHRDKPIREQAENIIHLFTLT
NLGAPAAFKYFDTTIDRKRYTSTKEVLDATLIHQSITGLYETRIDLS
QLGGDSGGSSGGSSGSETPGTSESATPESSGGSSGGSSGIQGLAKLIA
DVAPSAIRENDIKSYFGRKVAIDASMSIYQFLIAVRQGGDVLQNEEGETT
SHLMGMFYRTIRMMENGIKPVYVFDGKPPQLKSGELAKRSERRAEAE
KQLQQAQAAGAEQEVEKFTKRLVKVTKQHNDECKHLLSLMGIPYLDA
PSEAEASCAALVKAGKVYAAATEDMDCLTFGSPVLMRHLTASEAKKLP
IQEFHLSRILQELGLNQEQFVDLCILLGSDYCESIRGIGPKRAVDLIQKH
KSIEEIVRRLDPNKYPVPENWLHKEAHQLFLEPEVLDPESVELKWSEPNE
EELIKFMCGEKQFSEERIRSGVKRLSKSRQGSTQGRLDDFFKVTGSLSS
AKRKEPEPKGSTKKKAKTGAAGKFKRGKSGGSSGGSSGSETPGTSES
ATPESSGGSSGGSSTLNIEDEYRLHETSKEPDVSLGSTWLSDFPQAWAET
GGMGLAVRQAPLIIPLKATSTPVSIKQYPMSQEARLGIKPHIQRLLDQGI
LVPCQSPWNTPLLPVKKPGTNDYRPVQDLREVNKRVEDIHPTVPNPYNLL
SGLPPSHQWYTVLDLKDAFFCLRLHPTSQPLFAFEWRDPEMGISGQLTWT
RLPQGFKNSPTLFNEALHRDLADFRIQHPDLILLQYVDDLLLAATSELDC
QQGTRALLQTLGNLGYRASAKKAQICQKQVKYLGYLLKEGQRWLTEARKE
TVMGQPTPKTPRQLREFLGKAGFCRLFIPGFAEMAAPLYPLTKPGTLFNW
GPDQQKAYQEIKQALLTAPALGLPDLTKPFELFVDEKQGYAKGVLTQKLG
PWRRPVAYLSKKLDPVAAGWPPCLRMVAAIAVLTKDAGKLTMGQPLVILA
PHAVEALVKQPPDRWLSNARMTHYQALLLDTDRVQFGPVVALNPATLLPL
PEEGLQHNCLDILAEAHGTRPDLTDQPLPDADHTWYTDGSSLLQEGQRKA
GAAVTTETEVIWAKALPAGTSAQRAELIALTQALKMAEGKKLNVYTDSRY
AFATAHIHGEIYRRRGWLTSEGKEIKNKDEILALLKALFLPKRLSIIHCP
GHQKGHSAEARGNRMADQAARKAAITETPDTSTLLIENSSPSGGSKRTAD
GSEFEPKKKRKV
KEY:
NUCLEAR LOCALIZATION SEQUENCE (NLS)
TOP:(SEQ ID NO: 124),
BOTTOM: (SEQ ID NO: 133)
CAS9(H840A) (SEQ ID NO: 157)
33-AMINO ACID LINKER 1 (SEQ ID NO: 127)
M-MLV REVERSE TRANSCRIPTASE (SEQ ID NO: 159)
33-AMINO ACID LINKER 2 (SEQ ID NO: 127)
FEN1 (SEQ ID NO: 161)

[0547] In other embodiments, the prime editor fusion proteins can be based on SaCas9 or on SpCas9 nickases with altered PAM specificities, such as the following exemplary sequences:

SACAS9-M-MLV RT PRIME EDITOR
(SEQ ID NO: 162)
MKRTADGSEFESPKKKRKVGKRNYILGLDIGITSVGYGIIDYETR
DVIDAGVRLFKEANVENNEGRRSKRGARRLKRRRRHRIQRVKK
LLFDYNLLTDHSELSGINPYEARVKGLSQKLSEEEFSAALLHLA
KRRGVHNVNEVEEDTGNELSTKEQISRNSKALEEKYVAELQLE
RLKKDGEVRGSINRFKTSDYVKEAKQLLKVQKAYHQLDQSFID
TYIDLLETRRTYYEGPGEGSPFGWKDIKEWYEMLMGHCTYFPE
ELRSVKYAYNADLYNALNDLNNLVITRDENEKLEYYEKFQIIEN
VFKQKKKPTLKQIAKEILVNEEDIKGYRVTSTGKPEFTNLKVYH
DIKDITARKEIIENAELLDQIAKILTIYQSSEDIQEELTNLNSELTQE
EIEQISNLKGYTGTHNLSLKAINLILDELWHTNDNQIAIFNRLKL
VPKKVDLSQQKEIPTTLVDDFILSPVVKRSFIQSIKVINAIIKKYG
LPNDIIIELAREKNSKDAQKMINEMQKRNRQTNERIEEIIRTTGK
ENAKYLIEKIKLHDMQEGKCLYSLEAIPLEDLLNNPFNYEVDHII
PRSVSFDNSFNNKVLVKQEEASKKGNRTPFQYLSSSDSKISYETF
KKHILNLAKGKGRISKTKKEYLLEERDINRFSVQKDFINRNLVD
TRYATRGLMNLLRSYFRVNNLDVKVKSINGGFTSFLRRKWKFK
KERNKGYKHHAEDALIIANADFIFKEWKKLDKAKKVMENQMF
EEKQAESMPEIETEQEYKEIFITPHQIKHIKDFKDYKYSHRVDKK
PNRELINDTLYSTRKDDKGNTLIVNNLNGLYDKDNDKLKKLIN
KSPEKLLMYHHDPQTYQKLKLIMEQYGDEKNPLYKYYEETGN
YLTKYSKKDNGPVIKKIKYYGNKLNAHLDITDDYPNSRNKVVK
LSLKPYRFDVYLDNGVYKFVTVKNLDVIKKENYYEVNSKCYE
EAKKLKKISNQAEFIASFYNNDLIKINGELYRVIGVNNDLLNRIE
VNMIDITYREYLENMNDKRPPRIIKTIASKTQSIKKYSTDILGNL
YEVKSKKHPQIIKKGSGGSSGGSSGSETPGTSESATPESSGGSSG
GSSTLNIEDEYRLHETSKEPDVSLGSTWLSDFPQAWAETGGMGL
AVRQAPLIIPLKATSTPVSIKQYPMSQEARLGIKPHIQRLLDQGIL
VPCQSPWNTPLLPVKKPGTNDYRPVQDLREVNKRVEDIHPTVP
NPYNLLSGLPPSHQWYTVLDLKDAFFCLRLHPTSQPLFAFEWR
DPEMGISGQLTWTRLPQGFKNSPTLFDEALHRDLADFRIQHPDL
ILLQYVDDLLLAATSELDCQQGTRALLQTLGNLGYRASAKKAQ
ICQKQVKYLGYLLKEGQRWLTEARKETVMGQPTPKTPRQLREF
LGTAGFCRLWIPGFAEMAAPLYPLTKTGTLFNWGPDQQKAYQEI
KQALLTAPALGLPDLTKPFELFVDEKQGYAKGVLTQKLGPWRR
PVAYLSKKLDPVAAGWPPCLRMVAAIAVLTKDAGKLTMGQPLVI
LAPHAVEALVKQPPDRWLSNARMTHYQALLLDTDRVQFGPVV
ALNPATLLPLPEEGLQHNCLDILAEAHGTRPDLTDQPLPDADHT
WYTDGSSLLQEGQRKAGAAVTTETEVIWAKALPAGTSAQRAEL
IALTQALKMAEGKKLNVYTDSRYAFATAHIHGEIYRRRGLLTSE
GKEIKNKDEILALLKALFLPKRLSIIHCPGHQKGHSAEARGNRM
ADQAARKAAITETPDTSTLLIENSSPSGGSKRTADGSEFEPKKKR
KV
SPCAS9(H840A)-VRQR-MALONEY MURINE LEUKEMIA VIRUS
REVERSE TRANSCRIPTASE PRIME EDITOR
(SEQ ID NO: 163)
MKRTADGSEFESPKKKRKVDKKYSIGLDIGTNSVGWAVITDEY
KVPSKKFKVLGNTDRHSIKKNLIGALLFDSGETAEATRLKRTAR
RRYTRRKNRICYLQEIFSNEMAKVDDSFFHRLEESFLVEEDKKH
ERHPIFGNIVDEVAYHEKYPTIYHLRKKLVDSTDKADLRLIYLAL
AHMIKFRGHFLIEGDLNPDNSDVDKLFIQLVQTYNQLFEENPIN
ASGVDAKAILSARLSKSRRLENLIAQLPGEKKNGLFGNLIALSL
GLTPNFKSNFDLAEDAKLQLSKDTYDDDLDNLLAQIGDQYADL
FLAAKNLSDAILLSDILRVNTEITKAPLSASMIKRYDEHHQDLTL
LKALVRQQLPEKYKEIFFDQSKNGYAGYIDGGASQEEFYKFIKPI
LEKMDGTEELLVKLNREDLLRKQRTFDNGSIPHQIHLGELHAIL
RRQEDFYPFLKDNREKIEKILTFRIPYYVGPLARGNSRFAWMTR
KSEETITPWNFEEVVDKGASAQSFIERMTNFDKNLPNEKVLPKH
SLLYEYFTVYNELTKVKYVTEGMRKPAFLSGEQKKAIVDLLFKT
NRKVTVKQLKEDYFKKIECFDSVEISGVEDRFNASLGTYHDLL
KIIKDKDFLDNEENEDILEDIVLTLTLFEDREMIEERLKTYAHLFD
DKVMKQLKRRRYTGWGRLSRKLINGIRDKQSGKTILDFLKSDG
FANRNFMQLIHDDSLTFKEDIQKAQVSGQGDSLHEHIANLAGSP
AIKKGILQTVKVVDELVKVMGRHKPENIVIEMARENQTTQKGQ
KNSRERMKRIEEGIKELGSQILKEHPVENTQLQNEKLYLYYLQN
GRDMYVDQELDINRLSDYDVDAIVPQSFLKDDSIDNKVLTRSD
KNRGKSDNVPSEEVVKKMKNYWRQLLNAKLITQRKFDNLTKA
ERGGLSELDKAGFIKRQLVETRQITKHVAQILDSRMNTKYDEND
KLIREVKVITLKSKLVSDFRKDFQFYKVREINNYHHAHDAYLNA
VVGTALIKKYPKLESEFVYGDYKVYDVRKMIAKSEQEIGKATA
KYFFYSNIMNFFKTEITLANGEIRKRPLIETNGETGEIVWDKGRD
FATVRKVLSMPQVNIVKKTEVQTGGFSKESILPKRNSDKLIARK
KDWDPKKYGGFVSPTVAYSVLVVAKVEKGKSKKLKSVKELLGI
TIEVIERSSFEKNPIDFLEAKGYKEVKKDLIIKLPKYSLFELENGRK
RMLASARELQKGNELALPSKYVNFLYLASHYEKLKGSPEDNEQ
KQLFVEQHKHYLDEIIEQISEFSKRVILADANLDKVLSAYNKHR
DKPIREQAENIIHLFTLTNLGAPAAFKYFDTTIDRKQYRSTKEVL
DATLIHQSITGLYETRIDLSQLGGDSGGSSGGSSGSETPGTSESAT
PESSGGSSGGSSTLNIEDEYRLHETSKEPDVSLGSTWLSDFPQA
WAETGGMGLAVRQAPLIIPLKATSTPVSIKQYPMSQEARLGIKP
HIQRLLDQGILVPCQSPWNTPLLPVKKPGTNDYRPVQDLREVN
KRVEDIHPTVPNPYNLLSGLPPSHQWYTVLDLKDAFFCLRLHPT
SQPLFAFEWRDPEMGISGQLTWTRLPQGFKNSPTLFNEALHRDL
ADFRIQHPDLILLQYVDDLLLAATSELDCQQGTRALLQTLGNLG
YRASAKKAQICQKQVKYLGYLLKEGQRWLTEARKETVMGQPT
PKTPRQLREFLGKAGFCRLFIPGFAEMAAPLYPLTKPGTLFNWG
PDQQKAYQEIKQALLTAPALGLPDLTKPFELFVDEKQGYAKGVL
TQKLGPWRRPVAYLSKKLDPVAAGWPPCLRMVAAIAVLTKDAG
KLTMGQPLVILAPHAVEALVKQPPDRWLSNARMTHYQALLLDT
DRVQFGPVVALNPATLLPLPEEGLQHNCLDILAEAHGTRPDLTD
QPLPDADHTWYTDGSSLLQEGQRKAGAAVTTETEVIWAKALPA
GTSAQRAELIALTQALKMAEGKKLNVYTDSRYAFATAHIHGEIY
RRRGWLTSEGKEIKNKDEILALLKALFLPKRLSIIHCPGHQKGHS
AEARGNRMADQAARKAAITETPDTSTLLIENSSPSGGSKRTADG
SEFEPKKKRKV
SPCAS9(H840A)-VRER-MALONEY MURINE LEUKEMIA VIRUS
REVERSE TRANSCRIPTASE PRIME EDITOR
(SEQ ID NO: 164)
MKRTADGSEFESPKKKRKVDKKYSIGLDIGTNSVGWAVITDEY
KVPSKKFKVLGNTDRHSIKKNLIGALLFDSGETAEATRLKRTAR
RRYTRRKNRICYLQEIFSNEMAKVDDSFFHRLEESFLVEEDKKH
ERHPIFGNIVDEVAYHEKYPTIYHLRKKLVDSTDKADLRLIYLAL
AHMIKFRGHFLIEGDLNPDNSDVDKLFIQLVQTYNQLFEENPIN
ASGVDAKAILSARLSKSRRLENLIAQLPGEKKNGLFGNLIALSL
GLTPNFKSNFDLAEDAKLQLSKDTYDDDLDNLLAQIGDQYADL
FLAAKNLSDAILLSDILRVNTEITKAPLSASMIKRYDEHHQDLTL
LKALVRQQLPEKYKEIFFDQSKNGYAGYIDGGASQEEFYKFIKPI
LEKMDGTEELLVKLNREDLLRKQRTFDNGSIPHQIHLGELHAIL
RRQEDFYPFLKDNREKIEKILTFRIPYYVGPLARGNSRFAWMTR
KSEETITPWNFEEVVDKGASAQSFIERMTNFDKNLPNEKVLPKH
SLLYEYFTVYNELTKVKYVTEGMRKPAFLSGEQKKAIVDLLFKT
NRKVTVKQLKEDYFKKIECFDSVEISGVEDRFNASLGTYHDLL
KIIKDKDFLDNEENEDILEDIVLTLTLFEDREMIEERLKTYAHLFD
DKVMKQLKRRRYTGWGRLSRKLINGIRDKQSGKTILDFLKSDG
FANRNFMQLIHDDSLTFKEDIQKAQVSGQGDSLHEHIANLAGSP
AIKKGILQTVKVVDELVKVMGRHKPENIVIEMARENQTTQKGQ
KNSRERMKRIEEGIKELGSQILKEHPVENTQLQNEKLYLYYLQN
GRDMYVDQELDINRLSDYDVDAIVPQSFLKDDSIDNKVLTRSD
KNRGKSDNVPSEEVVKKMKNYWRQLLNAKLITQRKFDNLTKA
ERGGLSELDKAGFIKRQLVETRQITKHVAQILDSRMNTKYDEND
KLIREVKVITLKSKLVSDFRKDFQFYKVREINNYHHAHDAYLNA
VVGTALIKKYPKLESEFVYGDYKVYDVRKMIAKSEQEIGKATA
KYFFYSNIMNFFKTEITLANGEIRKRPLIETNGETGEIVWDKGRD
FATVRKVLSMPQVNIVKKTEVQTGGFSKESILPKRNSDKLIARK
KDWDPKKYGGFVSPTVAYSVLVVAKVEKGKSKKLKSVKELLGI
TIIVIERSSFEKNPIDFLEAKGYKEVKKDLIIKLPKYSLFELENGRK
RMLASARELQKGNELALPSKYVNFLYLASHYEKLKGSPEDNEQ
KQLFVEQHKHYLDEIIEQISEFSKRVILADANLDKVLSAYNKHR
DKPIREQAENIIHLFTLTNLGAPAAFKYFDTTIDRKEYRSTKEVL
DATLIHQSITGLYETRIDLSQLGGDSGGSSGGSSGSETPGTSESAT
PESSGGSSGGSSTLNIEDEYRLHETSKEPDVSLGSTWLSDFPQA
WAETGGMGLAVRQAPLIIPLKATSTPVSIKQYPMSQEARLGIKP
HIQRLLDQGILVPCQSPWNTPLLPVKKPGTNDYRPVQDLREVN
KRVEDIHPTVPNPYNLLSGLPPSHQWYTVLDLKDAFFCLRLHPT
SQPLFAFEWRDPEMGISGQLTWTRLPQGFKNSPTLFNEALHRDL
ADFRIQHPDLILLQYVDDLLLAATSELDCQQGTRALLQTLGNLG
YRASAKKAQICQKQVKYLGYLLKEGQRWLTEARKETVMGQPT
PKTPRQLREFLGKAGFCRLFIPGFAEMAAPLYPLTKPGTLFNWG
PDQQKAYQEIKQALLTAPALGLPDLTKPFELFVDEKQGYAKGVL
TQKLGPWRRPVAYLSKKLDPVAAGWPPCLRMVAAIAVLTKDAG
KLTMGQPLVILAPHAVEALVKQPPDRWLSNARMTHYQALLLDT
DRVQFGPVVALNPATLLPLPEEGLQHNCLDILAEAHGTRPDLTD
QPLPDADHTWYTDGSSLLQEGQRKAGAAVTTETEVIWAKALPA
GTSAQRAELIALTQALKMAEGKKLNVYTDSRYAFATAHIHGEIY
RRRGWLTSEGKEIKNKDEILALLKALFLPKRLSIIHCPGHQKGHS
AEARGNRMADQAARKAAITETPDTSTLLIENSSPSGGSKRTADG
SEFEPKKKRKV

[0548] In yet other embodiments, the prime editor fusion proteins contemplated herein may include a Cas9 nickase (e.g., Cas9 (H840A)) fused to a truncated version of M-MLV reverse transcriptase. In this embodiment, the reverse transcriptase also contains 4 mutations (D200N, T306K, W313F, T330P; noting that the L603W mutation present in PE2 is no longer present due to the truncation). The DNA sequence encoding this truncated editor is 522 bp smaller than PE2, and therefore makes its potentially useful for applications where delivery of the DNA sequence is challenging due to its size (i.e. adeno-associated virus and lentivirus delivery). This embodiment is referred to as Cas9(H840A)-MMLV-RT(trunc) or “PE2-short” or “PE2-trunc” and has the following amino acid sequence:

CAS9(H840A)-MMLV-RT(TRUNC) OR PE2-SHORT
(SEQ ID NO: 765)
MKRTADGSEFESPKKKRKVDKKYSIGLDIGTNSVGWAVITDE
YKVPSKKFKVLGNTDRHSIKKNLIGALLFDSGETAEATRLK
RTARRRYTRRKNRICYLQEIFSNEMAKVDDSFFHRLEESFLV
EEDKKHERHPIFGNIVDEVAYHEKYPTIYHLRKKLVDSTDK
ADLRLIYLALAHMIKFRGHFLIEGDLNPDNSDVDKLFIQLVQ
TYNQLFEENPINASGVDAKAILSARLSKSRRLENLIAQLPGE
KKNGLFGNLIALSLGLTPNFKSNFDLAEDAKLQLSKDTYDD
DLDNLLAQIGDQYADLFLAAKNLSDAILLSDILRVNTEITKA
PLSASMIKRYDEHHQDLTLLKALVRQQLPEKYKEIFFDQSK
NGYAGYIDGGASQEEFYKFIKPILEKMDGTEELLVKLNRED
LLRKQRTFDNGSIPHQIHLGELHAILRRQEDFYPFLKDNREK
IEKILTFRIPYYVGPLARGNSRFAWMTRKSEETITPWNFEEV
VDKGASAQSFIERMTNFDKNLPNEKVLPKHSLLYEYFTVYN
ELTKVKYVTEGMRKPAFLSGEQKKAIVDLLFKTNRKVTVK
QLKEDYFKKIECFDSVEISGVEDRFNASLGTYHDLLKIIKDK
DFLDNEENEDILEDIVLTLTLFEDREMIEERLKTYAHLFDDK
VMKQLKRRRYTGWGRLSRKLINGIRDKQSGKTILDFLKSD
GFANRNFMQLIHDDSLTFKEDIQKAQVSGQGDSLHEHIANL
AGSPAIKKGILQTVKVVDELVKVMGRHKPENIVIEMARENQ
TTQKGQKNSRERMKRIEEGIKELGSQILKEHPVENTQLQNE
KLYLYYLQNGRDMYVDQELDINRLSDYDVDAIVPQSFLKDD
SIDNKVLTRSDKNRGKSDNVPSEEVVKKMKNYWRQLLNAK
LITQRKFDNLTKAERGGLSELDKAGFIKRQLVETRQITKHV
AQILDSRMNTKYDENDKLIREVKVITLKSKLVSDFRKDFQF
YKVREINNYHHAHDAYLNAVVGTALIKKYPKLESEFVYGDY
KVYDVRKMIAKSEQEIGKATAKYFFYSNIMNFFKTEITLAN
GEIRKRPLIETNGETGEIVWDKGRDFATVRKVLSMPQVNIV
KKTEVQTGGFSKESILPKRNSDKLIARKKDWDPKKYGGFDS
PTVAYSVLVVAKVEKGKSKKLKSVKELLGITIMERSSFEKN
PIDFLEAKGYKEVKKDLIIKLPKYSLFELENGRKRMLASAG
ELQKGNELALPSKYVNFLYLASHYEKLKGSPEDNEQKQLFV
EQHKHYLDEIIEQISEFSKRVILADANLDKVLSAYNKHRDKP
IREQAENIIHLFTLTNLGAPAAFKYFDTTIDRKRYTSTKEVL
DATLIHQSITGLYETRIDLSQLGGDSGGSSGGSSGSETPGTSE
SATPESSGGSSGGSSTLNIEDEYRLHETSKEPDVSLGSTWLSDFPQ
AWAETGGMGLAVRQAPLIIPLKATSTPVSIKQYPMSQEARLGIKPHI
QRLLDQGILVPCQSPWNTPLLPVKKPGTNDYRPVQDLREVNKRVE
DIHPTVPNPYNLLSGLPPSHQWYTVLDLKDAFFCLRLHPTSQPLFA
FEWRDPEMGISGQLTWTRLPQGFKNSPTLFNEALHRDLADFRIQH
PDLILLQYVDDLLLAATSELDCQQGTRALLQTLGNLGYRASAKKAQI
CQKQVKYLGYLLKEGQRWLTEARKETVMGQPTPKTPRQLREFLGK
AGFCRLFIPGFAEMAAPLYPLTKPGTLFNWGPDQQKAYQEIKQAL
LTAPALGLPDLTKPFELFVDEKQGYAKGVLTQKLGPWRRPVAYLSK
KLDPVAAGWPPCLRMVAAIAVLTKDAGKLTMGQPLVILAPHAVEA
LVKQPPDRWLSNARMTHYQALLLDTDRVQFGPVVALNPATLLPLP
EEGLQHNCLDNSRLINSGGSKRTADGSEFEPKKKRKV
KEY:
NUCLEAR LOCALIZATION SEQUENCE (NLS)
TOP:(SEQ ID NO: 124), BOTTOM: (SEQ ID NO: 133)
CAS9(H840A) (SEQ ID NO: 157)
33-AMINO ACID LINKER 1 (SEQ ID NO: 127)
M-MLV TRUNCATED REVERSE TRANSCRIPTASE (SEQ ID NO:
766)

[0549] See FIG. 75, which provides a bar graph comparing the efficiency (i.e., “% of total sequencing reads with the specified eidt or indels”) of PE2, PE2-trunc, PE3, and PE3-trunc over different target sites in various cell lines. The data shows that the prime editors comprising the truncated RT variants were about as efficient as the prime editors comprising the non-trunctated RT proteins.

[0550] In various embodiments, the prime editor fusion proteins contemplated herein may also include any variants of the above-disclosed sequences having an amino acid sequence that is at least about 70% identical, at least about 80% identical, at least about 90% identical, at least about 95% identical, at least about 96% identical, at least about 97% identical, at least about 98% identical, at least about 99% identical, at least about 99.5% identical, or at least about 99.9% identical to PE1, PE2, or any of the above indicated prime editor fusion sequences.

[0551] In certain embodiments, linkers may be used to link any of the peptides or peptide domains or moieties of the invention (e.g., a napDNAbp linked or fused to a reverse transcriptase).

### [5] Linkers and Other Domains

[0552] The PE fusion proteins may comprise various other domains besides the napDNAbp (e.g., Cas9 domain) and the polymerase domain (e.g., RT domain). For example, in the case where the napDNAbp is a Cas9 and the polymerase is a RT, the PE fusion proteins may comprise one or more linkers that join the Cas9 domain with the RT domain. The linkers may also join other functional domains, such as nuclear localization sequences (NLS) or a FEN1 (or other flap endonuclease) to the PE fusion proteins or a domain thereof.

[0553] In addition, in embodiments involving trans prime editing, linkers may be used to link tPERT recruitment protein to a prime editor, e.g., between the tPERt recruitment protein and the napDNAbp. See e.g., FIG. 3G for an exemplary schematic of a trans prime editor (tPE) that includes linkers to separately fuse a polymerase domain and a recruiting protein domain to a napDNAbp.

[0554] A. Linkers

[0555] As defined above, the term “linker,” as used herein, refers to a chemical group or a molecule linking two molecules or moieties, e.g., a binding domain and a cleavage domain of a nuclease. In some embodiments, a linker joins a gRNA binding domain of an RNA-programmable nuclease and the catalytic domain of a polymerase (e.g., a reverse transcriptase). In some embodiments, a linker joins a dCas9 and reverse transcriptase. Typically, the linker is positioned between, or flanked by, two groups, molecules, or other moieties and connected to each one via a covalent bond, thus connecting the two. In some embodiments, the linker is an amino acid or a plurality of amino acids (e.g., a peptide or protein). In some embodiments, the linker is an organic molecule, group, polymer, or chemical moiety. In some embodiments, the linker is 5-100 amino acids in length, for example, 5, 6, 7, 8, 9, 10, 11, 12, 13, 14, 15, 16, 17, 18, 19, 20, 21, 22, 23, 24, 25, 26, 27, 28, 29, 30, 30-35, 35-40, 40-45, 45-50, 50-60, 60-70, 70-80, 80-90, 90-100, 100-150, or 150-200 amino acids in length. Longer or shorter linkers are also contemplated.

[0556] The linker may be as simple as a covalent bond, or it may be a polymeric linker many atoms in length. In certain embodiments, the linker is a polpeptide or based on amino acids. In other embodiments, the linker is not peptide-like. In certain embodiments, the linker is a covalent bond (e.g., a carbon-carbon bond, disulfide bond, carbon-heteroatom bond, etc.). In certain embodiments, the linker is a carbon-nitrogen bond of an amide linkage. In certain embodiments, the linker is a cyclic or acyclic, substituted or unsubstituted, branched or unbranched aliphatic or heteroaliphatic linker. In certain embodiments, the linker is polymeric (e.g., polyethylene, polyethylene glycol, polyamide, polyester, etc.). In certain embodiments, the linker comprises a monomer, dimer, or polymer of aminoalkanoic acid. In certain embodiments, the linker comprises an aminoalkanoic acid (e.g., glycine, ethanoic acid, alanine, beta-alanine, 3-aminopropanoic acid, 4-aminobutanoic acid, 5-pentanoic acid, etc.). In certain embodiments, the linker comprises a monomer, dimer, or polymer of aminohexanoic acid (Ahx). In certain embodiments, the linker is based on a carbocyclic moiety (e.g., cyclopentane, cyclohexane). In other embodiments, the linker comprises a polyethylene glycol moiety (PEG). In other embodiments, the linker comprises amino acids. In certain embodiments, the linker comprises a peptide. In certain embodiments, the linker comprises an aryl or heteroaryl moiety. In certain embodiments, the linker is based on a phenyl ring. The linker may included funtionalized moieties to facilitate attachment of a nucleophile (e.g., thiol, amino) from the peptide to the linker. Any electrophile may be used as part of the linker. Exemplary electrophiles include, but are not limited to, activated esters, activated amides, Michael acceptors, alkyl halides, aryl halides, acyl halides, and isothiocyanates.

[0557] In some other embodiments, the linker comprises the amino acid sequence (GGGGS)ₙ (SEQ ID NO: 165), (G)ₙ (SEQ ID NO: 166), (EAAAK)ₙ (SEQ ID NO: 167), (GGS)ₙ (SEQ ID NO: 168), (SGGS)ₙ (SEQ ID NO: 169), (XP)ₙ (SEQ ID NO: 170), or any combination thereof, wherein n is independently an integer between 1 and 30, and wherein X is any amino acid. In some embodiments, the linker comprises the amino acid sequence (GGS)N(SEQ ID NO: 176), wherein n is 1, 3, or 7. In some embodiments, the linker comprises the amino acid sequence SGSETPGTSESATPES (SEQ ID NO: 171). In some embodiments, the linker comprises the amino acid sequence SGGSSGGSSGSETPGTSESATPESSGGSSGGS (SEQ ID NO: 172). In some embodiments, the linker comprises the amino acid sequence SGGSGGSGGS (SEQ ID NO: 173). In some embodiments, the linker comprises the amino acid sequence SGGS (SEQ ID NO: 174). In other embodiments, the linker comprises the amino acid sequence

(SEQ ID NO: 175, 60AA)
SGGSSGGSSGSETPGTSESATPESAGSYPYDVPDYAGSAAPAAKKKKLD
GSGSGGSSGGS.

[0558] In certain embodiments, linkers may be used to link any of the peptides or peptide domains or moieties of the invention (e.g., a napDNAbp linked or fused to a reverse transcriptase).

[0559] As defined above, the term “linker,” as used herein, refers to a chemical group or a molecule linking two molecules or moieties, e.g., a binding domain and a cleavage domain of a nuclease. In some embodiments, a linker joins a gRNA binding domain of an RNA-programmable nuclease and the catalytic domain of a recombinase. In some embodiments, a linker joins a dCas9 and reverse transcriptase. Typically, the linker is positioned between, or flanked by, two groups, molecules, or other moieties and connected to each one via a covalent bond, thus connecting the two. In some embodiments, the linker is an amino acid or a plurality of amino acids (e.g., a peptide or protein). In some embodiments, the linker is an organic molecule, group, polymer, or chemical moiety. In some embodiments, the linker is 5-100 amino acids in length, for example, 5, 6, 7, 8, 9, 10, 11, 12, 13, 14, 15, 16, 17, 18, 19, 20, 21, 22, 23, 24, 25, 26, 27, 28, 29, 30, 30-35, 35-40, 40-45, 45-50, 50-60, 60-70, 70-80, 80-90, 90-100, 100-150, or 150-200 amino acids in length. Longer or shorter linkers are also contemplated.

[0560] The linker may be as simple as a covalent bond, or it may be a polymeric linker many atoms in length. In certain embodiments, the linker is a polypeptide or based on amino acids. In other embodiments, the linker is not peptide-like. In certain embodiments, the linker is a covalent bond (e.g., a carbon-carbon bond, disulfide bond, carbon-heteroatom bond, etc.). In certain embodiments, the linker is a carbon-nitrogen bond of an amide linkage. In certain embodiments, the linker is a cyclic or acyclic, substituted or unsubstituted, branched or unbranched aliphatic or heteroaliphatic linker. In certain embodiments, the linker is polymeric (e.g., polyethylene, polyethylene glycol, polyamide, polyester, etc.). In certain embodiments, the linker comprises a monomer, dimer, or polymer of aminoalkanoic acid. In certain embodiments, the linker comprises an aminoalkanoic acid (e.g., glycine, ethanoic acid, alanine, beta-alanine, 3-aminopropanoic acid, 4-aminobutanoic acid, 5-pentanoic acid, etc.). In certain embodiments, the linker comprises a monomer, dimer, or polymer of aminoHEXAnoic acid (Ahx). In certain embodiments, the linker is based on a carbocyclic moiety (e.g., cyclopentane, cycloHEXAne). In other embodiments, the linker comprises a polyethylene glycol moiety (PEG). In other embodiments, the linker comprises amino acids. In certain embodiments, the linker comprises a peptide. In certain embodiments, the linker comprises an aryl or heteroaryl moiety. In certain embodiments, the linker is based on a phenyl ring. The linker may included funtionalized moieties to facilitate attachment of a nucleophile (e.g., thiol, amino) from the peptide to the linker. Any electrophile may be used as part of the linker. Exemplary electrophiles include, but are not limited to, activated esters, activated amides, Michael acceptors, alkyl halides, aryl halides, acyl halides, and isothiocyanates.

[0561] In some other embodiments, the linker comprises the amino acid sequence (GGGGS)ₙ (SEQ ID NO: 165), (G)ₙ (SEQ ID NO: 166), (EAAAK)ₙ (SEQ ID NO: 167), (GGS)ₙ (SEQ ID NO: 168), (SGGS)ₙ (SEQ ID NO: 169), (XP)ₙ (SEQ ID NO: 170), or any combination thereof, wherein n is independently an integer between 1 and 30, and wherein X is any amino acid. In some embodiments, the linker comprises the amino acid sequence (GGS)N(SEQ ID NO: 176), wherein n is 1, 3, or 7. In some embodiments, the linker comprises the amino acid sequence SGSETPGTSESATPES (SEQ ID NO: 171). In some embodiments, the linker comprises the amino acid sequence SGGSSGGSSGSETPGTSESATPESSGGSSGGS (SEQ ID NO: 172). In some embodiments, the linker comprises the amino acid sequence SGGSGGSGGS (SEQ ID NO: 173). In some embodiments, the linker comprises the amino acid sequence SGGS (SEQ ID NO: 174).

[0562] In particular, the following linkers can be used in various embodiments to join prime editor domains with one another:

(SEQ ID NO: 767)
GGS;
(SEQ ID NO: 768)
GGSGGS;
(SEQ ID NO: 769)
GGSGGSGGS;
(SEQ ID NO: 127)
SGGSSGGSSGSETPGTSESATPESSGGSSGGSS;
(SEQ ID NO: 171)
SGSETPGTSESATPES;
(SEQ ID NO: 175)
SGGSSGGSSGSETPGTSESATPESAGSYPYDVPDYAGSAAPAAKKKKLD
GSGSGGSSGGS.

[0563] B. Nuclear Localization Sequence (NLS)

[0564] In various embodiments, the PE fusion proteins may comprise one or more nuclear localization sequences (NLS), which help promote translocation of a protein into the cell nucleus. Such sequences are well-known in the art and can include the following examples:

| DESCRIPTION | SEQUENCE | SEQ ID NO: |
|---|---|---|
| NLS OF | PKKKRKV | SEQ ID NO: 16 |
| SV40 | | |
| LARGE T- | | |
| AG | | |
| NLS | MKRTADGSEFESPKKKRKV | SEQ ID NO: 124 |
| NLS | MDSLLMNRRKFLYQFKNVRWA | SEQ ID NO: 17 |
| | KGRRETYLC | |
| NLS OF | AVKRPAATKKAGQAKKKKLD | SEQ ID NO: 190 |
| NUCLEO- | | |
| PLASMIN | | |
| NLS OF | MSRRRKANPTKLSENAKKLAK | SEQ ID NO: 191 |
| EGL-13 | EVEN | |
| NLS OF C- | PAAKRVKLD | SEQ ID NO: 192 |
| MYC | | |
| NLS OF | KLKIKRPVK | SEQ ID NO: 193 |
| TUS- | | |
| PROTEIN | | |
| NLS OF | VSRKRPRP | SEQ ID NO: 194 |
| POLYOMA | | |
| LARGE T- | | |
| AG | | |
| NLS OF | EGAPPAKRAR | SEQ ID NO: 195 |
| HEPATITIS | | |
| D VIRUS | | |
| ANTIGEN | | |
| NLS OF | PPQPKKKPLDGE | SEQ ID NO: 196 |
| MURINE | | |
| P53 | | |
| NLS OF | SGGSKRTADGSEFEPKKKRKV | SEQ ID NO: 133 |
| PE1 AND | | |
| PE2 | | |

[0565] The NLS examples above are non-limiting. The PE fusion proteins may comprise any known NLS sequence, including any of those described in Cokol et al., “Finding nuclear localization signals,” EMBO Rep., 2000, 1(5): 411-415 and Freitas et al., “Mechanisms and Signals for the Nuclear Import of Proteins,” Current Genomics, 2009, 10(8): 550-7, each of which are incorporated herein by reference.

[0566] In various embodiments, the prime editors and constructs encoding the prime editors disclosed herein further comprise one or more, preferably, at least two nuclear localization signals. In certain embodiments, the prime editors comprise at least two NLSs. In embodiments with at least two NLSs, the NLSs can be the same NLSs or they can be different NLSs. In addition, the NLSs may be expressed as part of a fusion protein with the remaining portions of the prime editors. In some embodiments, one or more of the NLSs are bipartite NLSs (“bpNLS”). In certain embodiments, the disclosed fusion proteins comprise two bipartite NLSs. In some embodiments, the disclosed fusion proteins comprise more than two bipartite NLSs.

[0567] The location of the NLS fusion can be at the N-terminus, the C-terminus, or within a sequence of a prime editor (e.g., inserted between the encoded napDNAbp component (e.g., Cas9) and a polymerase domain (e.g., a reverse transcriptase domain).

[0568] The NLSs may be any known NLS sequence in the art. The NLSs may also be any future-discovered NLSs for nuclear localization. The NLSs also may be any naturally-occurring NLS, or any non-naturally occurring NLS (e.g., an NLS with one or more desired mutations).

[0569] The term “nuclear localization sequence” or “NLS” refers to an amino acid sequence that promotes import of a protein into the cell nucleus, for example, by nuclear transport. Nuclear localization sequences are known in the art and would be apparent to the skilled artisan. For example, NLS sequences are described in Plank et al., International PCT application PCT/EP2000/011690, filed Nov. 23, 2000, published as WO/2001/038547 on May 31, 2001, the contents of which are incorporated herein by reference. In some embodiments, an NLS comprises the amino acid sequence PKKKRKV (SEQ ID NO: 16), MDSLLMNRRKFLYQFKNVRWAKGRRETYLC (SEQ ID NO: 17), KRTADGSEFESPKKKRKV (SEQ ID NO: 3864), or KRTADGSEFEPKKKRKV (SEQ ID NO: 125). In other embodiments, NLS comprises the amino acid sequences

(SEQ ID NO: 136)
NLSKRPAAIKKAGQAKKKK,
(SEQ ID NO: 192)
PAAKRVKLD,
(SEQ ID NO: 3934)
RQRRNELKRSF,
(SEQ ID NO: 3935)
NQSSNFGPMKGGNFGGRSSGPYGGGGQYFAKPRNQGGY.

[0570] In one aspect of the disclosure, a prime editor may be modified with one or more nuclear localization signals (NLS), preferably at least two NLSs. In certain embodiments, the prime editors are modified with two or more NLSs. The disclosure contemplates the use of any nuclear localization signal known in the art at the time of the disclosure, or any nuclear localization signal that is identified or otherwise made available in the state of the art after the time of the instant filing. A representative nuclear localization signal is a peptide sequence that directs the protein to the nucleus of the cell in which the sequence is expressed. A nuclear localization signal is predominantly basic, can be positioned almost anywhere in a protein's amino acid sequence, generally comprises a short sequence of four amino acids (Autieri & Agrawal, (1998) J. Biol. Chem. 273: 14731-37, incorporated herein by reference) to eight amino acids, and is typically rich in lysine and arginine residues (Magin et al., (2000) Virology 274: 11-16, incorporated herein by reference). Nuclear localization signals often comprise proline residues. A variety of nuclear localization signals have been identified and have been used to effect transport of biological molecules from the cytoplasm to the nucleus of a cell. See, e.g., Tinland et al., (1992) Proc. Natl. Acad. Sci. U.S.A. 89:7442-46; Moede et al., (1999) FEBS Lett. 461:229-34, which is incorporated by reference. Translocation is currently thought to involve nuclear pore proteins.

[0571] Most NLSs can be classified in three general groups: (i) a monopartite NLS exemplified by the SV40 large T antigen NLS (PKKKRKV (SEQ ID NO: 16)); (ii) a bipartite motif consisting of two basic domains separated by a variable number of spacer amino acids and exemplified by the Xenopus nucleoplasmin NLS (KRXXXXXXXXXXKKKL (SEQ ID NO: 3936)); and (iii) noncanonical sequences such as M9 of the hnRNP Al protein, the influenza virus nucleoprotein NLS, and the yeast Gal4 protein NLS (Dingwall and Laskey 1991).

[0572] Nuclear localization signals appear at various points in the amino acid sequences of proteins. NLS's have been identified at the N-terminus, the C-terminus and in the central region of proteins. Thus, the disclosure provides prime editors that may be modified with one or more NLSs at the C-terminus, the N-terminus, as well as at in internal region of the prime editor. The residues of a longer sequence that do not function as component NLS residues should be selected so as not to interfere, for example tonically or sterically, with the nuclear localization signal itself. Therefore, although there are no strict limits on the composition of an NLS-comprising sequence, in practice, such a sequence can be functionally limited in length and composition.

[0573] The present disclosure contemplates any suitable means by which to modify a prime editor to include one or more NLSs. In one aspect, the prime editors may be engineered to express a prime editor protein that is translationally fused at its N-terminus or its C-terminus (or both) to one or more NLSs, i.e., to form a prime editor-NLS fusion construct. In other embodiments, the prime editor-encoding nucleotide sequence may be genetically modified to incorporate a reading frame that encodes one or more NLSs in an internal region of the encoded prime editor. In addition, the NLSs may include various amino acid linkers or spacer regions encoded between the prime editor and the N-terminally, C-terminally, or internally-attached NLS amino acid sequence, e.g, and in the central region of proteins. Thus, the present disclosure also provides for nucleotide constructs, vectors, and host cells for expressing fusion proteins that comprise a prime editor and one or more NLSs.

[0574] The prime editors described herein may also comprise nuclear localization signals which are linked to a prime editor through one or more linkers, e.g., and polymeric, amino acid, nucleic acid, polysaccharide, chemical, or nucleic acid linker element. The linkers within the contemplated scope of the disclosure are not intented to have any limitations and can be any suitable type of molecule (e.g., polymer, amino acid, polysaccharide, nucleic acid, lipid, or any synthetic chemical linker domain) and be joined to the prime editor by any suitable strategy that effectuates forming a bond (e.g., covalent linkage, hydrogen bonding) between the prime editor and the one or more NLS s.

[0575] C. Flap Endonucleases (e.g., FEN1)

[0576] In various embodiments, the PE fusion proteins may comprise one or more flap endonulceases (e.g., FEN1), which refers to an enzyme that catalyzes the removal of 5′ single strand DNA flaps. These are naturally occurring enzymes that process the removal of 5′ flaps formed during cellular processes, including DNA replication. The prime editing methods herein described may utilize endogenously supplied flap endonucleases or those provided in trans to remove the 5′ flap of endogenouse DNA formed at the target site during prime editing. Flap endonucleases are known in the art and can be found described in Patel et al., “Flap endonucleases pass 5′-flaps through a flexible arch using a disorder-thread-order mechanism to confer specificity for free 5′-ends,” Nucleic Acids Research, 2012, 40(10): 4507-4519 and Tsutakawa et al., “Human flap endonuclease structures, DNA double-base flipping, and a unified understanding of the FEN1 superfamily,” Cell, 2011, 145(2): 198-211 (each of which are incorporated herein by reference). An exemplary flap endonuclease is FEN1, which can be represented by the following amino acid sequence:

| Description | Sequence | SEQ ID NO: |
|---|---|---|
| FEN1 | MGIQGLAKLIADVAPSAIRENDIKSYFGRKVAIDASMSI | SEQ ID NO: |
| Wild type | YQFLIAVRQGGDVLQNEEGETTSHLMGMFYRTIRMMENG | 198 |
| (wt) | IKPVYVFDGKPPQLKSGELAKRSERRAEAEKQLQQAQAA | |
| | GAEQEVEKFTKRLVKVTKQHNDECKHLLSLMGIPYLDAP | |
| | SEAEASCAALVKAGKVYAAATEDMDCLTFGSPVLMRHLT | |
| | ASEAKKLPIQEFHLSRILQELGLNQEQFVDLCILLGSDY | |
| | CESIRGIGPKRAVDLIQKHKSIEEIVRRLDPNKYPVPEN | |
| | WLHKEAHQLFLEPEVLDPESVELKWSEPNEEELIKFMCG | |
| | EKQFSEERIRSGVKRLSKSRQGSTQGRLDDFFKVTGSLS | |
| | SAKRKEPEPKGSTKKKAKTGAAGKFKRGK | |

[0577] The flap endonucleases may also include any FEN1 variant, mutant, or other flap endonuclease ortholog, homolog, or variant. Non-limiting FEN1 variant examples are as follows:

| Description | Sequence | SEQ ID NO: |
|---|---|---|
| FEN1 | MGIQGLAKLIADVAPSAIRENDIKSYFGRKVAIDASMSI | SEQ ID NO: |
| K168R | YQFLIAVRQGGDVLQNEEGETTSHLMGMFYRTIRMMENG | 199 |
| (relative to | IKPVYVFDGKPPQLKSGELAKRSERRAEAEKQLQQAQAA | |
| FEN1 wt) | GAEQEVEKFTKRLVKVTKQHNDECKHLLSLMGIPYLDAP | |
| | SEAEASCAALVRAGKVYAAATEDMDCLTFGSPVLMRHLT | |
| | ASEAKKLPIQEFHLSRILQELGLNQEQFVDLCILLGSDY | |
| | CESIRGIGPKRAVDLIQKHKSIEEIVRRLDPNKYPVPEN | |
| | WLHKEAHQLFLEPEVLDPESVELKWSEPNEEELIKFMCG | |
| | EKQFSEERIRSGVKRLSKSRQGSTQGRLDDFFKVTGSLS | |
| | SAKRKEPEPKGSTKKKAKTGAAGKFKRGK | |
| FEN1 | MGIQGLAKLIADVAPSAIRENDIKSYFGRKVAIDASMSI | SEQ ID NO: |
| S187A | YQFLIAVRQGGDVLQNEEGETTSHLMGMFYRTIRMMENG | 200 |
| (relative to | IKPVYVFDGKPPQLKSGELAKRSERRAEAEKQLQQAQAA | |
| FEN1 wt) | GAEQEVEKFTKRLVKVTKQHNDECKHLLSLMGIPYLDAP | |
| | SEAEASCAALVKAGKVYAAATEDMDCLTFGAPVLMRHLT | |
| | ASEAKKLPIQEFHLSRILQELGLNQEQFVDLCILLGSDY | |
| | CESIRGIGPKRAVDLIQKHKSIEEIVRRLDPNKYPVPEN | |
| | WLHKEAHQLFLEPEVLDPESVELKWSEPNEEELIKFMCG | |
| | EKQFSEERIRSGVKRLSKSRQGSTQGRLDDFFKVTGSLS | |
| | SAKRKEPEPKGSTKKKAKTGAAGKFKRGK | |
| FEN1 | MGIQGLAKLIADVAPSAIRENDIKSYFGRKVAIDASMSI | SEQ ID NO: |
| K354R | YQFLIAVRQGGDVLQNEEGETTSHLMGMFYRTIRMMENG | 201 |
| (relative to | IKPVYVFDGKPPQLKSGELAKRSERRAEAEKQLQQAQAA | |
| FEN1 wt) | GAEQEVEKFTKRLVKVTKQHNDECKHLLSLMGIPYLDAP | |
| | SEAEASCAALVKAGKVYAAATEDMDCLTFGSPVLMRHLT | |
| | ASEAKKLPIQEFHLSRILQELGLNQEQFVDLCILLGSDY | |
| | CESIRGIGPKRAVDLIQKHKSIEEIVRRLDPNKYPVPEN | |
| | WLHKEAHQLFLEPEVLDPESVELKWSEPNEEELIKFMCG | |
| | EKQFSEERIRSGVKRLSKSRQGSTQGRLDDFFKVTGSLS | |
| | SARRKEPEPKGSTKKKAKTGAAGKFKRGK | |
| GEN1 | MGVNDLWQILEPVKQHIPLRNLGGKTIAVDLSLWVCEAQ | SEQ ID NO: |
| | TVKKMMGSVMKPHLRNLFFRISYLTQMDVKLVFVMEGEP | 202 |
| | PKLKADVISKRNQSRYGSSGKSWSQKTGRSHFKSVLREC | |
| | LHMLECLGIPWVQAAGEAEAMCAYLNAGGHVDGCLTNDG | |
| | DTFLYGAQTVYRNFTMNTKDPHVDCYTMSSIKSKLGLDR | |
| | DALVGLAILLGCDYLPKGVPGVGKEQALKLIQILKGQSL | |
| | LQRFNRWNETSCNSSPQLLVTKKLA | |
| | HCSVCSHPGSPKDHERNGCRLCKSDKYCEPHDYEYCC | |
| | PCEWHRTEHDRQLSEVENNIKKKACCCEGFPFHEVIQ | |
| | EFLLNKDKLVKVIRYQRPDLLLFQRFTLEKMEWPNHY | |
| | ACEKLLVLLTHYDMIERKLGSRNSNQLQPIRIVKTRI | |
| | RNGVHCFEIEWEKPEHYAMEDKQHGEFALLTIEEESL | |
| | FEAAYPEIVAVYQKQKLEIKGKKQKRIKPKENNLPEPDEVM | |
| | SFQSHMTLKPTCEIFHKQNSKLNSGISPDPTLPQESISAS | |
| | LNSLLLPKNTPCLNAQEQFMSSLRPLAIQQIKAVSKSLI | |
| | SESSQPNTSSHNISVIADLHLSTIDWEGTSFSNSPAIQRN | |
| | TFSHDLKSEVESELSAIPDGFENIPEQLSCESERYTANIK | |
| | KVLDEDSDGISPEEHLLSGITDLCLQDLPLKERIFTKLSY | |
| | PQDNLQPDVNLKTLSILSVKESCIANSGSDCTSHLSKDL | |
| | PGIPLQNESRDSKILKGDQLLQEDYKVNTSVPYSVSNT | |
| | VVKTCNVRPPNTALDHSRKVDMQTTRKILMKKSVCLD | |
| | RHSSDEQSAPVFGKAKYTTQRMKHSSQKHNSSHFKES | |
| | GHNKLSSPKIHIKETEQCVRSYETAENEESCFPDSTKSS | |
| | LSSLQCHKKENNSGTCLDSPLPLRQRLKLRFQST | |
| ERCC5 | MGVQGLWKLLECSGRQVSPEALEGKILAVDISIWLNQ | SEQ ID NO: |
| | ALKGVRDRHGNSIENPHLLTLFHRLCKLLFFRIRPIFVF | 203 |
| | DGDAPLLKKQTLVKRRQRKDLASSDSRKTTEKLLKTF | |
| | LKRQAIKTAFRSKRDEALPSLTQVRRENDLYVLPPLQE | |
| | EEKHSSEEEDEKEWQERMNQKQALQEEFFHNPQAIDIE | |
| | SEDFSSLPPEVKHEILTDMKEFTKRRRTLFEAMPEESDD | |
| | FSQYQLKGLLKKNYLNQHIEHVQKEMNQQHSGHIRRQ | |
| | YEDEGGFLKEVESRRVVSEDTSHYILIKGIQAKTVAEV | |
| | DSESLPSSSKMHGMSFDVKSSPCEKLKTEKEPDATPPSP | |
| | RTLLAMQAALLGSSSEEELESENRRQARGRNAPAAVD | |
| | EGSISPRTLSAIKRALDDDEDVKVCAGDDVQTGGPGAE | |
| | EMRINSSTENSDEGLKVRDGKGIPFTATLASSSVNSAEE | |
| | HVASTNEGREPTDSVPKEQMSLVHVGTEAFPISDESMI | |
| | KDRKDRLPLESAVVRHSDAPGLPNGRELTPASPTCTNS | |
| | VSKNETHAEVLEQQNELCPYESKFDSSLLSSDDETKCK | |
| | PNSASEVIGPVSLQETSSIVSVPSEAVDNVENVVSFNAK | |
| | EHENFLETIQEQQTTESAGQDLISIPKAVEPMEIDSEESE | |
| | SDGSFIEVQSVISDEELQAEFPETSKPPSEQGEEELVGTR | |
| | EGEAPAESESLLRDNSERDDVDGEPQEAEKDAEDSLHE | |
| | WQDINLEELETLESNLLAQQNSLKAQKQQQERIAATVT | |
| | GQMFLESQELLRLFGIPYIQAPMEAEAQCAILDLTDQTS | |
| | GTITDDSDIWLFGARHVYRNFFNKNKFVEYYQYVDFH | |
| | NQLGLDRNKLINLAYLLGSDYTEGIPTVGCVTAMEILN | |
| | EFPGHGLEPLLKFSEWWHEAQKNPKIRPNPHDTKVKK | |
| | KLRTLQLTPGFPNPAVAEAYLKPVVDDSKGSFLWGKP | |
| | DLDKIREFCQRYFGWNRTKTDESLFPVLKQLDAQQTQ | |
| | LRIDSFFRLAQQEKEDAKRIKSQRLNRAVTCMLRKEKE | |
| | AAASEIEAVSVAMEKEFELLDKAKRKTQKRGITNTLEE | |
| | SSSLKRKRLSDSKRKNTCGGFLGETCLSESSDGSSSEDA | |
| | ESSSLMNVQRRTAAKEPKTSASDSQNSVKEAPVKNGG | |
| | ATTSSSSDSDDDGGKEKMVLVTARSVFGKKRRKLRRA | |
| | RGRKRKT | |

[0578] In various embodiments, the prime editor fusion proteins contemplated herein may include any flap endonulcease variant of the above-disclosed sequences having an amino acid sequence that is at least about 70% identical, at least about 80% identical, at least about 90% identical, at least about 95% identical, at least about 96% identical, at least about 97% identical, at least about 98% identical, at least about 99% identical, at least about 99.5% identical, or at least about 99.9% identical to any of the above sequences.

[0579] Other endonucleases that may be utilized by the instant methods to facilitate removal of the 5′ end single strand DNA flap include, but are not limited to (1) trex 2, (2) exol endonuclease (e.g., Keijzers et al., Biosci Rep. 2015, 35(3): e00206)

### Trex 2

[0580] 3′ three prime repair exonuclease 2 (TREX2)—human

[0581] Accession No. NM_080701

(SEQ ID NO: 3865)
MSEAPRAETFVFLDLEATGLPSVEPEIAELSLFAVHRSSLENPEHDESGA
LVLPRVLDKLTLCMCPERPFTAKASEITGLS SEGLARCRKAGFDGAVVR
TLQAFLSRQAGPICLVAHNGFDYDFPLLCAELRRLGARLPRDTVCLDTLP
ALRGLDRAHSHGTRARGRQGYSLGSLFHRYFRAEPSAAHSAEGDVHTLLL
IFLHRAAELLAWADEQARGWAHIEPMYLPPDDPSLEA.

[0582] 3′ three prime repair exonuclease 2 (TREX2)—mouse

[0583] Accession No. NM_011907

(SEQ ID NO: 3866)
MSEPPRAETFVFLDLEATGLPNMDPEIAEISLFAVHRSSLENPERDDSGS
LVLPRVLDKLTLCMCPERPFTAKASEITGLSSESLMHCGKAGFNGAVVRT
LQGFLSRQEGPICLVAHNGFDYDFPLLCTELQRLGAHLPQDTVCLDTLPA
LRGLDRAHSHGTRAQGRKSYSLASLFHRYFQAEPSAAHSAEGDVHTLLLI
FLHRAPELLAWADEQARSWAHIEPMYVPPDGPSLEA.

[0584] 3′ three prime repair exonuclease 2 (TREX2)—rat

[0585] Accession No. NM_001107580

(SEQ ID NO: 3867)
MSEPLRAETFVFLDLEATGLPNMDPEIAEISLFAVHRSSLENPERDDSG
SLVLPRVLDKLTLCMCPERPFTAKASEITGLSSEGLMNCRKAAFNDAVV
RTLQGFLSRQEGPICLVAHNGFDYDFPLLCTELQRLGAHLPRDTVCLDT
LPALRGLDRVHSHGTRAQGRKSYSLASLFHRYFQAEPSAAHSAEGDVNT
LLLIFLHRAPELLAWADEQARSWAHIEPMYVPPDGPSLEA.

### Exol

[0586] Human exonuclease 1 (EXO1) has been implicated in many different DNA metabolic processes, including DNA mismatch repair (MMR), micro-mediated end-joining, homologous recombination (HR), and replication. Human EXO1 belongs to a family of eukaryotic nucleases, Rad2/XPG, which also include FEN1 and GEN1. The Rad2/XPG family is conserved in the nuclease domain through species from phage to human. The EXO1 gene product exhibits both 5′ exonuclease and 5′ flap activity. Additionally, EXO1 contains an intrinsic 5′ RNase H activity. Human EXO1 has a high affinity for processing double stranded DNA (dsDNA), nicks, gaps, pseudo Y structures and can resolve Holliday junctions using its inherit flap activity. Human EXO1 is implicated in MMR and contain conserved binding domains interacting directly with MLH1 and MSH2. EXO1 nucleolytic activity is positively stimulated by PCNA, MutSα (MSH2/MSH6 complex), 14-3-3, MRN and 9-1-1 complex.

exonuclease 1 (EXO1) Accession No. NM_003686 (Homo
sapiens exonuclease 1 (EXO1), transcript variant
3) - isoform A
(SEQ ID NO: 3868)
MGIQGLLQFIKEASEPIHVRKYKGQVVAVDTYCWLHKGAIACAEKLAKGE
PTDRYVGFCMKFVNMLLSHGIKPILVFDGCTLPSKKEVERSRRERRQANL
LKGKQLLREGKVSEARECFTRSINITHAMAHKVIKAARSQGVDCLVAPYE
ADAQLAYLNKAGIVQAIITEDSDLLAFGCKKVILKMDQFGNGLEIDQARL
GMCRQLGDVFTEEKFRYMCILSGCDYLSSLRGIGLAKACKVLRLANNPDI
VKVIKKIGHYLKMNITVPEDYINGFIRANNTFLYQLVFDPIKRKLIPLNA
YEDDVDPETLSYAGQYVDDSIALQIALGNKDINTFEQIDDYNPDTAMPAH
SRSHSWDDKTCQKSANVSSIWHRNYSPRPESGTVSDAPQLKENPSTVGVE
RVISTKGLNLPRKSSIVKRPRSAELSEDDLLSQYSLSFTKKTKKNSSEGN
KSLSFSEVFVPDLVNGPTNKKSVSTPPRTRNKFATFLQRKNEESGAVVVP
GTRSRFFCSSDSTDCVSNKVSIQPLDETAVTDKENNLHESEYGDQEGKRL
VDTDVARNSSDDIPNNHIPGDHIPDKATVFTDEESYSFESSKFTRTISPP
TLGTLRSCFSWSGGLGDFSRTPSPSPSTALQQFRRKSDSPTSLPENNMSD
VSQLKSEESSDDESHPLREEACSSQSQESGEFSLQSSNASKLSQCSSKDS
DSEESDCNIKLLDSQSDQTSKLRLSHFSKKDTPLRNKVPGLYKSSSADSL
STTKIKPLGPARASGLSKKPASIQKRKHEINAENKPGLQIKLNELWKNFG
FKKF.
exonuclease 1 (EXO1) Accession No. NM_006027 (Homo
sapiens exonuclease 1 (EXO1), transcript variant
3) - isoform B
(SEQ ID NO: 3869)
MGIQGLLQFIKEASEPIHVRKYKGQVVAVDTYCWLHKGAIACAEKLAKGE
PTDRYVGFCMKFVNMLLSHGIKPILVFDGCTLPSKKEVERSRRERRQANL
LKGKQLLREGKVSEARECFTRSINITHAMAHKVIKAARSQGVDCLVAPYE
ADAQLAYLNKAGIVQAIITEDSDLLAFGCKKVILKMDQFGNGLEIDQARL
GMCRQLGDVFTEEKFRYMCILSGCDYLSSLRGIGLAKACKVLRLANNPDI
VKVIKKIGHYLKMNITVPEDYINGFIRANNTFLYQLVFDPIKRKLIPLNA
YEDDVDPETLSYAGQYVDDSIALQIALGNKDINTFEQIDDYNPDTAMPAH
SRSHSWDDKTCQKSANVSSIWHRNYSPRPESGTVSDAPQLKENPSTVGVE
RVISTKGLNLPRKSSIVKRPRSAELSEDDLLSQYSLSFTKKTKKNSSEGN
KSLSFSEVFVPDLVNGPTNKKSVSTPPRTRNKFATFLQRKNEESGAVVVP
GTRSRFFCSSDSTDCVSNKVSIQPLDETAVTDKENNLHESEYGDQEGKRL
VDTDVARNSSDDIPNNHIPGDHIPDKATVFTDEESYSFESSKFTRTISPP
TLGTLRSCFSWSGGLGDFSRTPSPSPSTALQQFRRKSDSPTSLPENNMSD
VSQLKSEESSDDESHPLREEACSSQSQESGEFSLQSSNASKLSQCSSKDS
DSEESDCNIKLLDSQSDQTSKLRLSHFSKKDTPLRNKVPGLYKSSSADSL
STTKIKPLGPARASGLSKKPASIQKRKHHNAENKPGLQIKLNELWKNFGF
KKDSEKLPPCKKPLSPVRDNIQLTPEAEEDIFNKPECGRVQRAIFQ.
exonuclease 1 (EXO1) Accession No. NM_001319224
(Homo sapiens exonuclease 1 (EXO1), transcript
variant 4) - isoform C
(SEQ ID NO: 3870)
MGIQGLLQFIKEASEPIHVRKYKGQVVAVDTYCWLHKGAIACAEKLAKGE
PTDRYVGFCMKFVNMLLSHGIKPILVFDGCTLPSKKEVERSRRERRQANL
LKGKQLLREGKVSEARECFTRSINITHAMAHKVIKAARSQGVDCLVAPYE
ADAQLAYLNKAGIVQAIITEDSDLLAFGCKKVILKMDQFGNGLEIDQARL
GMCRQLGDVFTEEKFRYMCILSGCDYLSSLRGIGLAKACKVLRLANNPDI
VKVIKKIGHYLKMNITVPEDYINGFIRANNTFLYQLVFDPIKRKLIPLNA
YEDDVDPETLSYAGQYVDDSIALQIALGNKDINTFEQIDDYNPDTAMPAH
SRSHSWDDKTCQKSANVSSIWHRNYSPRPESGTVSDAPQLKENPSTVGVE
RVISTKGLNLPRKSSIVKRPRSELSEDDLLSQYSLSFTKKTKKNSSEGNK
SLSFSEVFVPDLVNGPTNKKSVSTPPRTRNKFATFLQRKNEESGAVVVPG
TRSRFFCSSDSTDCVSNKVSIQPLDETAVTDKENNLHESEYGDQEGKRLV
DTDVARNSSDDIPNNHIPGDHIPDKATVFTDEESYSFESSKFTRTISPPT
LGTLRSCFSWSGGLGDFSRTPSPSPSTALQQFRRKSDSPTSLPENNMSDV
SQLKSEESSDDESHPLREEACSSQSQESGEFSLQSSNASKLSQCSSKDSD
SEESDCNIKLLDSQSDQTSKLRLSHFSKKDTPLRNKVPGLYKSSSADSLS
TTKIKPLGPARASGLSKKPASIQKRKHHNAENKPGLQIKLNELWKNFGFK
KDSEKLPPCKKPLSPVRDNIQLTPEAEEDIFNKPECGRVQRAIFQ.

[0587] D. Inteins and Split-Inteins

[0588] It will be understood that in some embodiments (e.g., delivery of a prime editor in vivo using AAV particles), it may be advantageous to split a polypeptide (e.g., a deaminase or a napDNAbp) or a fusion protein (e.g., a prime editor) into an N-terminal half and a C-terminal half, delivery them separately, and then allow their colocalization to reform the complete protein (or fusion protein as the case may be) within the cell. Separate halves of a protein or a fusion protein may each comprise a split-intein tag to facilitate the reformation of the complete protein or fusion protein by the mechanism of protein trans splicing.

[0589] Protein trans-splicing, catalyzed by split inteins, provides an entirely enzymatic method for protein ligation. A split-intein is essentially a contiguous intein (e.g. a mini-intein) split into two pieces named N-intein and C-intein, respectively. The N-intein and C-intein of a split intein can associate non-covalently to form an active intein and catalyze the splicing reaction essentially in same way as a contiguous intein does. Split inteins have been found in nature and also engineered in laboratories. As used herein, the term “split intein” refers to any intein in which one or more peptide bond breaks exists between the N-terminal and C-terminal amino acid sequences such that the N-terminal and C-terminal sequences become separate molecules that can non-covalently reassociate, or reconstitute, into an intein that is functional for trans-splicing reactions. Any catalytically active intein, or fragment thereof, may be used to derive a split intein for use in the methods of the invention. For example, in one aspect the split intein may be derived from a eukaryotic intein. In another aspect, the split intein may be derived from a bacterial intein. In another aspect, the split intein may be derived from an archaeal intein. Preferably, the split intein so-derived will possess only the amino acid sequences essential for catalyzing trans-splicing reactions.

[0590] As used herein, the “N-terminal split intein (In)” refers to any intein sequence that comprises an N- terminal amino acid sequence that is functional for trans-splicing reactions. An In thus also comprises a sequence that is spliced out when trans-splicing occurs. An In can comprise a sequence that is a modification of the N-terminal portion of a naturally occurring intein sequence. For example, an In can comprise additional amino acid residues and/or mutated residues so long as the inclusion of such additional and/or mutated residues does not render the In non-functional in trans-splicing. Preferably, the inclusion of the additional and/or mutated residues improves or enhances the trans-splicing activity of the In.

[0591] As used herein, the “C-terminal split intein (Ic)” refers to any intein sequence that comprises a C- terminal amino acid sequence that is functional for trans-splicing reactions. In one aspect, the Ic comprises 4 to 7 contiguous amino acid residues, at least 4 amino acids of which are from the last β-strand of the intein from which it was derived. An Ic thus also comprises a sequence that is spliced out when trans-splicing occurs. An Ic can comprise a sequence that is a modification of the C-terminal portion of a naturally occurring intein sequence. For example, an Ic can comprise additional amino acid residues and/or mutated residues so long as the inclusion of such additional and/or mutated residues does not render the In non-functional in trans-splicing. Preferably, the inclusion of the additional and/or mutated residues improves or enhances the trans-splicing activity of the Ic.

[0592] In some embodiments of the invention, a peptide linked to an Ic or an In can comprise an additional chemical moiety including, among others, fluorescence groups, biotin, polyethylene glycol (PEG), amino acid analogs, unnatural amino acids, phosphate groups, glycosyl groups, radioisotope labels, and pharmaceutical molecules. In other embodiments, a peptide linked to an Ic can comprise one or more chemically reactive groups including, among others, ketone, aldehyde, Cys residues and Lys residues. The N-intein and C-intein of a split intein can associate non-covalently to form an active intein and catalyze the splicing reaction when an “intein-splicing polypeptide (ISP)” is present. As used herein, “intein-splicing polypeptide (ISP)” refers to the portion of the amino acid sequence of a split intein that remains when the Ic, In, or both, are removed from the split intein. In certain embodiments, the In comprises the ISP. In another embodiment, the Ic comprises the ISP. In yet another embodiment, the ISP is a separate peptide that is not covalently linked to In nor to Ic.

[0593] Split inteins may be created from contiguous inteins by engineering one or more split sites in the unstructured loop or intervening amino acid sequence between the −12 conserved beta-strands found in the structure of mini-inteins. Some flexibility in the position of the split site within regions between the beta-strands may exist, provided that creation of the split will not disrupt the structure of the intein, the structured beta-strands in particular, to a sufficient degree that protein splicing activity is lost.

[0594] In protein trans-splicing, one precursor protein consists of an N-extein part followed by the N-intein, another precursor protein consists of the C-intein followed by a C-extein part, and a trans-splicing reaction (catalyzed by the N- and C-inteins together) excises the two intein sequences and links the two extein sequences with a peptide bond. Protein trans-splicing, being an enzymatic reaction, can work with very low (e.g. micromolar) concentrations of proteins and can be carried out under physiological conditions.

[0595] Exemplary sequences are as follows:

| NAME | SEQUENCE OF LIGAND-DEPENDENT INTEIN |
|---|---|
| 2-4 INTEIN: | CLAEGTRIFDPVTGTTHRIEDVVDGRKPIHVVAAAKDGTLLARPVV |
| | SWFDQGTRDVIGLRIAGGAIVWATPDHKVLTEYGWRAAGELRKGD |
| | RVAGPGGSGNSLALSLTADQMVSALLDAEPPILYSEYDPTSPFSEAS |
| | MMGLLTNLADRELVHMINWAKRVPGFVDLTLHDQAHLLECAWLEI |
| | LMIGLVWRSMEHPGKLLFAPNLLLDRNQGKCVEGMVEIFDMLLAT |
| | SSRFRMMNLQGEEFVCLKSIILLNSGVYTFLSSTLKSLEEKDHIHRA |
| | LDKITDTLIHLMAKAGLTLQQQHQRLAQLLLILSHIRHMSNKGMEH |
| | LYSMKYKNVVPLYDLLLEMLDAHRLHAGGSGASRVQAFADALDD |
| | KFLHDMLAEELRYSVIREVLPTRRARTFDLEVEELHTLVAEGVVVH |
| | NC (SEQ ID NO: 8) |
| 3-2 INTEIN | CLAEGTRIFDPVTGTTHRIEDVVDGRKPIHVVAVAKDGTLLARPVVS |
| | WFDQGTRDVIGLRIAGGAIVWATPDHKVLTEYGWRAAGELRKGDR |
| | VAGPGGSGNSLALSLTADQMVSALLDAEPPILYSEYDPTSPFSEASM |
| | MGLLTNLADRELVHMINWAKRVPGFVDLTLHDQAHLLECAWLEIL |
| | MIGLVWRSMEHPGKLLFAPNLLLDRNQGKCVEGMVEIFDMLLATS |
| | SRFRMMNLQGEEFVCLKSIILLNSGVYTFLSSTLKSLEEKDHIHRAL |
| | DKITDTLIHLMAKAGLTLQQQHQRLAQLLLILSHIRHMSNKGMEHL |
| | YSMKYTNVVPLYDLLLEMLDAHRLHAGGSGASRVQAFADALDDK |
| | FLHDMLAEELRYSVIREVLPTRRARTFDLEVEELHTLVAEGVVVHN |
| | C (SEQ ID NO: 9) |
| 30R3-1 INTEIN | CLAEGTRIFDPVTGTTHRIEDVVDGRKPIHVVAAAKDGTLLARPVV |
| | SWFDQGTRDVIGLRIAGGATVWATPDHKVLTEYGWRAAGELRKG |
| | DRVAGPGGSGNSLALSLTADQMVSALLDAEPPIPYSEYDPTSPFSEA |
| | SMMGLLTNLADRELVHMINWAKRVPGFVDLTLHDQAHLLECAWL |
| | EILMIGLVWRSMEHPGKLLFAPNLLLDRNQGKCVEGMVEIFDMLL |
| | ATSSRFRMMNLQGEEFVCLKSIILLNSGVYTFLSSTLKSLEEKDHIH |
| | RALDKITDTLIHLMAKAGLTLQQQHQRLAQLLLILSHIRHMSNKGM |
| | EHLYSMKYKNVVPLYDLLLEMLDAHRLHAGGSGASRVQAFADAL |
| | DDKFLHDMLAEGLRYSVIREVLPTRRARTFDLEVEELHTLVAEGVV |
| | VHNC (SEQ ID NO: 10) |
| 30R3-2 INTEIN | CLAEGTRIFDPVTGTTHRIEDVVDGRKPIHVVAAAKDGTLLARPVV |
| | SWFDQGTRDVIGLRIAGGATVWATPDHKVLTEYGWRAAGELRKG |
| | DRVAGPGGSGNSLALSLTADQMVSALLDAEPPILYSEYDPTSPFSEA |
| | SMMGLLTNLADRELVHMINWAKRVPGFVDLTLHDQAHLLECAWL |
| | EILMIGLVWRSMEHPGKLLFAPNLLLDRNQGKCVEGMVEIFDMLL |
| | ATSSRFRMMNLQGEEFVCLKSIILLNSGVYTFLSSTLKSLEEKDHIH |
| | RALDKITDTLIHLMAKAGLTLQQQHQRLAQLLLILSHIRHMSNKGM |
| | EHLYSMKYKNVVPLYDLLLEMLDAHRLHAGGSGASRVQAFADAL |
| | DDKFLHDMLAEELRYSVIREVLPTRRARTFDLEVEELHTLVAEGVV |
| | VHNC (SEQ ID NO: 11) |
| 30R3-3 INTEIN | CLAEGTRIFDPVTGTTHRIEDVVDGRKPIHVVAAAKDGTLLARPVV |
| | SWFDQGTRDVIGLRIAGGATVWATPDHKVLTEYGWRAAGELRKG |
| | DRVAGPGGSGNSLALSLTADQMVSALLDAEPPIPYSEYDPTSPFSEA |
| | SMMGLLTNLADRELVHMINWAKRVPGFVDLTLHDQAHLLECAWL |
| | EILMIGLVWRSMEHPGKLLFAPNLLLDRNQGKCVEGMVEIFDMLL |
| | ATSSRFRMMNLQGEEFVCLKSIILLNSGVYTFLSSTLKSLEEKDHIH |
| | RALDKITDTLIHLMAKAGLTLQQQHQRLAQLLLILSHIRHMSNKGM |
| | EHLYSMKYKNVVPLYDLLLEMLDAHRLHAGGSGASRVQAFADAL |
| | DDKFLHDMLAEELRYSVIREVLPTRRARTFDLEVEELHTLVAEGVV |
| | VHNC (SEQ ID NO: 12) |
| 37R3-1 INTEIN | CLAEGTRIFDPVTGTTHRIEDVVDGRKPIHVVAAAKDGTLLARPVV |
| | SWFDQGTRDVIGLRIAGGATVWATPDHKVLTEYGWRAAGELRKG |
| | DRVAGPGGSGNSLALSLTADQMVSALLDAEPPILYSEYNPTSPFSEA |
| | SMMGLLTNLADRELVHMINWAKRVPGFVDLTLHDQAHLLERAWL |
| | EILMIGLVWRSMEHPGKLLFAPNLLLDRNQGKCVEGMVEIFDMLL |
| | ATSSRFRMMNLQGEEFVCLKSIILLNSGVYTFLSSTLKSLEEKDHIH |
| | RALDKITDTLIHLMAKAGLTLQQQHQRLAQLLLILSHIRHMSNKGM |
| | EHLYSMKYKNVVPLYDLLLEMLDAHRLHAGGSGASRVQAFADAL |
| | DDKFLHDMLAEGLRYSVIREVLPTRRARTFDLEVEELHTLVAEGVV |
| | VHNC ((SEQ ID NO: 13) |
| 37R3-2 INTEIN | CLAEGTRIFDPVTGTTHRIEDVVDGRKPIHVVAAAKDGTLLARPVV |
| | SWFDQGTRDVIGLRIAGGAIVWATPDHKVLTEYGWRAAGELRKGD |
| | RVAGPGGSGNSLALSLTADQMVSALLDAEPPILYSEYDPTSPFSEAS |
| | MMGLLTNLADRELVHMINWAKRVPGFVDLTLHDQAHLLERAWLEI |
| | LMIGLVWRSMEHPGKLLFAPNLLLDRNQGKCVEGMVEIFDMLLAT |
| | SSRFRMMNLQGEEFVCLKSIILLNSGVYTFLSSTLKSLEEKDHIHRA |
| | LDKITDTLIHLMAKAGLTLQQQHQRLAQLLLILSHIRHMSNKGMEH |
| | LYSMKYKNVVPLYDLLLEMLDAHRLHAGGSGASRVQAFADALDD |
| | KFLHDMLAEGLRYSVIREVLPTRRARTFDLEVEELHTLVAEGVVVH |
| | NC (SEQ ID NO: 14) |
| 37R3-3 INTEIN | CLAEGTRIFDPVTGTTHRIEDVVDGRKPIHVVAVAKDGTLLARPVVS |
| | WFDQGTRDVIGLRIAGGATVWATPDHKVLTEYGWRAAGELRKGD |
| | RVAGPGGSGNSLALSLTADQMVSALLDAEPPILYSEYDPTSPFSEAS |
| | MMGLLTNLADRELVHMINWAKRVPGFVDLTLHDQAHLLERAWLEI |
| | LMIGLVWRSMEHPGKLLFAPNLLLDRNQGKCVEGMVEIFDMLLAT |
| | SSRFRMMNLQGEEFVCLKSIILLNSGVYTFLSSTLKSLEEKDHIHRA |
| | LDKITDTLIHLMAKAGLTLQQQHQRLAQLLLILSHIRHMSNKGMEH |
| | LYSMKYKNVVPLYDLLLEMLDAHRLHAGGSGASRVQAFADALDD |
| | KFLHDMLAEELRYSVIREVLPTRRARTFDLEVEELHTLVAEGVVVH |
| | NC (SEQ ID NO: 15) |

[0596] Although inteins are most frequently found as a contiguous domain, some exist in a naturally split form. In this case, the two fragments are expressed as separate polypeptides and must associate before splicing takes place, so-called protein trans-splicing.

[0597] An exemplary split intein is the Ssp DnaE intein, which comprises two subunits, namely, DnaE-N and DnaE-C. The two different subunits are encoded by separate genes, namely dnaE-n and dnaE-c, which encode the DnaE-N and DnaE-C subunits, respectively. DnaE is a naturally occurring split intein in Synechocytis sp. PCC6803 and is capable of directing trans-splicing of two separate proteins, each comprising a fusion with either DnaE-N or DnaE-C.

[0598] Additional naturally occurring or engineered split-intein sequences are known in the or can be made from whole-intein sequences described herein or those available in the art. Examples of split-intein sequences can be found in Stevens et al., “A promiscuous split intein with expanded protein engineering applications,” PNAS, 2017, Vol. 114: 8538-8543; Iwai et al., “Highly efficient protein trans-splicing by a naturally split DnaE intein from Nostc punctiforme, FEBS Lett, 580: 1853-1858, each of which are incorporated herein by reference. Additional split intein sequences can be found, for example, in WO 2013/045632, WO 2014/055782, WO 2016/069774, and EP2877490, the contents each of which are incorporated herein by reference.

[0599] In addition, protein splicing in trans has been described in vivo and in vitro (Shingledecker, et al., Gene 207:187 (1998), Southworth, et al., EMBO J. 17:918 (1998); Mills, et al., Proc. Natl. Acad. Sci. USA, 95:3543-3548 (1998); Lew, et al., J. Biol. Chem., 273:15887-15890 (1998); Wu, et al., Biochim. Biophys. Acta 35732:1 (1998b), Yamazaki, et al., J. Am. Chem. Soc. 120:5591 (1998), Evans, et al., J. Biol. Chem. 275:9091 (2000); Otomo, et al., Biochemistry 38:16040-16044 (1999); Otomo, et al., J. Biolmol. NMR 14:105-114 (1999); Scott, et al., Proc. Natl. Acad. Sci. USA 96:13638-13643 (1999)) and provides the opportunity to express a protein as to two inactive fragments that subsequently undergo ligation to form a functional product, e.g., as shown in FIGS. 66 and 67 with regard to the formation of a complete PE fusion protein from two separately-expressed halves.

[0600] E. RNA-Protein Interaction Domain

[0601] In various embodiments, two separate protein domains (e.g., a Cas9 domain and a polymerase domain) may be colocalized to one another to form a functional complex (akin to the function of a fusion protein comprising the two separate protein domains) by using an “RNA-protein recruitment system,” such as the “MS2 tagging technique.” Such systems generally tag one protein domain with an “RNA-protein interaction domain” (aka “RNA-protein recruitment domain”) and the other with an “RNA-binding protein” that specifically recognizes and binds to the RNA-protein interaction domain, e.g., a specific hairpin structure. These types of systems can be leveraged to colocalize the domains of a prime editor, as well as to recruitment additional functionalities to a prime editor, such as a UGI domain. In one example, the MS2 tagging technique is based on the natural interaction of the MS2 bacteriophage coat protein (“MCP” or “MS2cp”) with a stem-loop or hairpin structure present in the genome of the phage, i.e., the “MS2 hairpin.” In the case of the MS2 hairpin, it is recognized and bound by the MS2 bacteriophage coat protein (MCP). Thus, in one exemplarly scenario a deaminase-MS2 fusion can recruit a Cas9-MCP fusion.

[0602] A review of other modular RNA-protein interaction domains are described in the art, for example, in Johansson et al., “RNA recognition by the MS2 phage coat protein,” Sem Virol., 1997, Vol. 8(3): 176-185; Delebecque et al., “Organization of intracellular reactions with rationally designed RNA assemblies,” Science, 2011, Vol. 333: 470-474; Mali et al., “Cas9 transcriptional activators for target specificity screening and paired nickases for cooperative genome engineering,” Nat. Biotechnol., 2013, Vol. 31: 833-838; and Zalatan et al., “Engineering complex synthetic transcriptional programs with CRISPR RNA scaffolds,” Cell, 2015, Vol. 160: 339-350, each of which are incorporated herein by reference in their entireties. Other systems include the PP7 hairpin, which specifically recruits the PCP protein, and the “corn” hairpin, which specifically recruits the Com protein. See Zalatan et al.

[0603] The nucleotide sequence of the MS2 hairpin (or equivalently referred to as the “MS2 aptamer”) is:

(SEQ ID NO: 763)
GCCAACATGAGGATCACCCATGTCTGCAGGGCC.

[0604] The amino acid sequence of the MCP or MS2cp is:

(SEQ ID NO: 764)
GSASNFTQFVLVDNGGTGDVTVAPSNFANGVAEWISSNSRSQAYKVTCS
VRQSSAQNRKYTIKVEVPKVATQTVGGEELPVAGWRSYLNMELTIPIFA
TNSDCELIVKAMQGLLKDGNPIPSAIAANSGIY.

[0605] F. UGI Domain

[0606] In other embodiments, the prime editors described herein may comprise one or more uracil glycosylase inhibitor domains. The term “uracil glycosylase inhibitor (UGI)” or “UGI domain,” as used herein, refers to a protein that is capable of inhibiting a uracil-DNA glycosylase base-excision repair enzyme. In some embodiments, a UGI domain comprises a wild-type UGI or a UGI as set forth in SEQ ID NO: 3873. In some embodiments, the UGI proteins provided herein include fragments of UGI and proteins homologous to a UGI or a UGI fragment. For example, in some embodiments, a UGI domain comprises a fragment of the amino acid sequence set forth in SEQ ID NO: 3873. In some embodiments, a UGI fragment comprises an amino acid sequence that comprises at least 60%, at least 65%, at least 70%, at least 75%, at least 80%, at least 85%, at least 90%, at least 95%, at least 96%, at least 97%, at least 98%, at least 99%, or at least 99.5% of the amino acid sequence as set forth in SEQ ID NO: 3873. In some embodiments, a UGI comprises an amino acid sequence homologous to the amino acid sequence set forth in SEQ ID NO: 3873, or an amino acid sequence homologous to a fragment of the amino acid sequence set forth in SEQ ID NO: 3873. In some embodiments, proteins comprising UGI or fragments of UGI or homologs of UGI or UGI fragments are referred to as “UGI variants.” A UGI variant shares homology to UGI, or a fragment thereof. For example a UGI variant is at least 70% identical, at least 75% identical, at least 80% identical, at least 85% identical, at least 90% identical, at least 95% identical, at least 96% identical, at least 97% identical, at least 98% identical, at least 99% identical, at least 99.5% identical, or at least 99.9% identical to a wild type UGI or a UGI as set forth in SEQ ID NO: 3873. In some embodiments, the UGI variant comprises a fragment of UGI, such that the fragment is at least 70% identical, at least 80% identical, at least 90% identical, at least 95% identical, at least 96% identical, at least 97% identical, at least 98% identical, at least 99% identical, at least 99.5% identical, or at least 99.9% to the corresponding fragment of wild-type UGI or a UGI as set forth in SEQ ID NO: 3873. In some embodiments, the UGI comprises the following amino acid sequence:

[0607] Uracil-DNA glycosylase inhibitor:

[0608] >sp|P14739|UNGI_BPPB2

(SEQ ID NO: 3873)
MTNLSDIIEKETGKQLVIQESILMLPEEVEEVIGNKPESDILVHTAYDE
STDENVMLLTSDAPEYKPWALVIQDSNGENKIKML.

[0609] The prime editors described herein may comprise more than one UGI domain, which may be separated by one or more linkers as described herein.

[0610] G. Additional PE Elements

[0611] In certain embodiments, the prime editors described herein may comprise an inhibitor of base repair. The term “inhibitor of base repair” or “IBR” refers to a protein that is capable in inhibiting the activity of a nucleic acid repair enzyme, for example a base excision repair enzyme. In some embodiments, the IBR is an inhibitor of OGG base excision repair. In some embodiments, the IBR is an inhibitor of base excision repair (“iBER”). Exemplary inhibitors of base excision repair include inhibitors of APE1, Endo III, Endo IV, Endo V, Endo VIII, Fpg, hOGG1, hNEIL1, T7 Endol, T4PDG, UDG, hSMUG1, and hAAG. In some embodiments, the IBR is an inhibitor of Endo V or hAAG. In some embodiments, the IBR is an iBER that may be a catalytically inactive glycosylase or catalytically inactive dioxygenase or a small molecule or peptide inhibitor of an oxidase, or variants threreof. In some embodiments, the IBR is an iBER that may be a TDG inhibitor, MBD4 inhibitor or an inhibitor of an AlkBH enzyme. In some embodiments, the IBR is an iBER that comprises a catalytically inactive TDG or catalytically inactive MBD4. An exemplary catalytically inactive TDG is an N140A mutant of SEQ ID NO: 3872 (human TDG).

[0612] Some exemplary glycosylases are provided below. The catalytically inactivated variants of any of these glycosylase domains are iBERs that may be fused to the napDNAbp or polymerase domain of the prime editors provided in this disclosure.

OGG (human)
(SEQ ID NO: 3937)
MPARALLPRRMGHRTLASTPALWASIPCPRSELRLDLVLPSGQSFRWREQ
SPAHWSGVLADQVWTLTQTEEQLHCTVYRGDKSQASRPTPDELEAVRKYF
QLDVTLAQLYHHWGSVDSHFQEVAQKFQGVRLLRQDPIECLFSFICSSNN
NIARITGMVERLCQAFGPRLIQLDDVTYHGEPSLQALAGPEVEAHLRKLG
LGYRARYVSASARAILEEQGGLAWLQQLRESSYEEAHKALCILPGVGTKV
ADCICLMALDKPQAVPVDVHMWHIAQRDYSWHPTTSQAKGPSPQTNKELG
NFFRSLWGPYAGWAQAVLFSADLRQSRHAQEPPAKRRKGSKGPEG
MPG (human)
(SEQ ID NO: 3938)
MVTPALQMKKPKQFCRRMGQKKQRPARAGQPHSSSDAAQAPAEQPHSSSD
AAQAPCPRERCLGPPTTPGPYRSIYFSSPKGHLTRLGLEFFDQPAVPLAR
AFLGQVLVRRLPNGTELRGRIVETEAYLGPEDEAAHSRGGRQTPRNRGMF
MKPGTLYVYIIYGMYFCMNISSQGDGACVLLRALEPLEGLETMRQLRSTL
RKGTASRVLKDRELCSGPSKLCQALAINKSFDQRDLAQDEAVWLERGPLE
PSEPAVVAAARVGVGHAGEWARKPLRFYVRGSPWVSVVDRVAEQDTQA
MBD4 (human)
(SEQ ID NO: 3871)
MGTTGLESLSLGDRGAAPTVTSSERLVPDPPNDLRKEDVAMELERVGEDE
EQMMIKRSSECNPLLQEPIASAQFGATAGTECRKSVPCGWERVVKQRLFG
KTAGRFDVYFISPQGLKFRSKSSLANYLHKNGETSLKPEDFDFTVLSKRG
IKSRYKDCSMAALTSHLQNQSNNSNWNLRTRSKCKKDVEMPPSSSSELQE
SRGLSNFTSTHLLLKEDEGVDDVNFRKVRKPKGKVTILKGIPIKKTKKGC
RKSCSGFVQSDSKRESVCNKADAESEPVAQKSQLDRTVCISDAGACGETL
SVTSEENSLVKKKERSLSSGSNFCSEQKTSGIINKFCSAKDSEHNEKYED
TFLESEEIGTKVEVVERKEHLHTDILKRGSEMDNNCSPTRKDFTGEKIFQ
EDTIPRTQIERRKTSLYFSSKYNKEALSPPRRKAFKKWTPPRSPFNLVQE
TLFHDPWKLLIATIFLNRTSGKMAIPVLWKFLEKYPSAEVARTADWRDVS
ELLKPLGLYDLRAKTIVKFSDEYLTKQWKYPIELHGIGKYGNDSYRIFCV
NEWKQVHPEDHKLNKYHDWLWENHEKLSLS
TDG (human)
(SEQ ID NO: 3872)
MEAENAGSYSLQQAQAFYTFPFQQLMAEAPNMAVVNEQQMPEEVPAPAPA
QEPVQEAPKGRKRKPRTTEPKQPVEPKKPVESKKSGKSAKSKEKQEKITD
TFKVKRKVDRFNGVSEAELLTKTLPDILTFNLDIVIIGINPGLMAAYKGH
HYPGPGNHFWKCLFMSGLSEVQLNHMDDHTLPGKYGIGFTNMVERTTPGS
KDLSSKEFREGGRILVQKLQKYQPRIAVFNGKCIYEIFSKEVFGVKVKNL
EFGLQPHKIPDTETLCYVMPSSSARCAQFPRAQDKVHYYIKLKDLRDQLK
GIERNMDVQEVQYTFDLQLAQEDAKKMAVKEEKYDPGYEAAYGGAYGENP
CSSEPCGFSSNGLIESVELRGESAFSGIPNGQWMTQSFTDQIPSFSNHCG
TQEQEEESHA

[0613] In some embodiments, the fusion proteins described herein may comprise one or more heterologous protein domains (e.g., about or more than about 1, 2, 3, 4, 5, 6, 7, 8, 9, 10, or more domains in addition to the prime editor components). A fusion protein may comprise any additional protein sequence, and optionally a linker sequence between any two domains. Other exemplary features that may be present are localization sequences, such as cytoplasmic localization sequences, export sequences, such as nuclear export sequences, or other localization sequences, as well as sequence tags that are useful for solubilization, purification, or detection of the fusion proteins.

[0614] Examples of protein domains that may be fused to a prime editor or component thereof (e.g., the napDNAbp domain, the polymerase domain, or the NLS domain) include, without limitation, epitope tags, and reporter gene sequences. Non-limiting examples of epitope tags include histidine (His) tags, V5 tags, FLAG tags, influenza hemagglutinin (HA) tags, Myc tags, VSV-G tags, and thioredoxin (Trx) tags. Examples of reporter genes include, but are not limited to, glutathione-5-transferase (GST), horseradish peroxidase (HRP), chloramphenicol acetyltransferase (CAT), beta-galactosidase, beta-glucuronidase, luciferase, green fluorescent protein (GFP), HcRed, DsRed, cyan fluorescent protein (CFP), yellow fluorescent protein (YFP), and autofluorescent proteins including blue fluorescent protein (BFP). A prime editor may be fused to a gene sequence encoding a protein or a fragment of a protein that bind DNA molecules or bind other cellular molecules, including, but not limited to, maltose binding protein (MBP), S-tag, Lex A DNA binding domain (DBD) fusions, GAL4 DNA binding domain fusions, and herpes simplex virus (HSV) BP16 protein fusions. Additional domains that may form part of a prime editor are described in US Patent Publication No. 2011/0059502, published Mar. 10, 2011 and incorporated herein by reference in its entirety.

[0615] In an aspect of the disclosure, a reporter gene which includes, but is not limited to, glutathione-5-transferase (GST), horseradish peroxidase (HRP), chloramphenicol acetyltransferase (CAT) beta-galactosidase, beta-glucuronidase, luciferase, green fluorescent protein (GFP), HcRed, DsRed, cyan fluorescent protein (CFP), yellow fluorescent protein (YFP), and autofluorescent proteins including blue fluorescent protein (BFP), may be introduced into a cell to encode a gene product which serves as a marker by which to measure the alteration or modification of expression of the gene product. In certain embodiments of the disclosure the gene product is luciferase. In a further embodiment of the disclosure the expression of the gene product is decreased.

[0616] Suitable protein tags provided herein include, but are not limited to, biotin carboxylase carrier protein (BCCP) tags, myc-tags, calmodulin-tags, FLAG-tags, hemagglutinin (HA)-tags, polyhistidine tags, also referred to as histidine tags or His-tags, maltose binding protein (MBP)-tags, nus-tags, glutathione-S-transferase (GST)-tags, green fluorescent protein (GFP)-tags, thioredoxin-tags, S-tags, Softags (e.g., Softag 1, Softag 3), strep-tags, biotin ligase tags, FlAsH tags, V5 tags, and SBP-tags. Additional suitable sequences will be apparent to those of skill in the art. In some embodiments, the fusion protein comprises one or more His tags.

[0617] In some embodiments of the present disclosure, the activity of the prime editing system may be temporally regulated by adjusting the residence time, the amount, and/or the activity of the expressed components of the PE system. For example, as described herein, the PE may be fused with a protein domain that is capable of modifying the intracellular half-life of the PE. In certain embodiments involving two or more vectors (e.g., a vector system in which the components described herein are encoded on two or more separate vectors), the activity of the PE system may be temporally regulated by controlling the timing in which the vectors are delivered. For example, in some embodiments a vector encoding the nuclease system may deliver the PE prior to the vector encoding the template. In other embodiments, the vector encoding the PEgRNA may deliver the guide prior to the vector encoding the PE system. In some embodiments, the vectors encoding the PE system and PEgRNA are delivered simultaneously. In certain embodiments, the simultaneously delivered vectors temporally deliver, e.g., the PE, PEgRNA, and/or second strand guide RNA components. In further embodiments, the RNA (such as, e.g., the nuclease transcript) transcribed from the coding sequence on the vectors may further comprise at least one element that is capable of modifying the intracellular half-life of the RNA and/or modulating translational control. In some embodiments, the half-life of the RNA may be increased. In some embodiments, the half-life of the RNA may be decreased. In some embodiments, the element may be capable of increasing the stability of the RNA. In some embodiments, the element may be capable of decreasing the stability of the RNA. In some embodiments, the element may be within the 3′ UTR of the RNA. In some embodiments, the element may include a polyadenylation signal (PA). In some embodiments, the element may include a cap, e.g., an upstream mRNA or PEgRNA end. In some embodiments, the RNA may comprise no PA such that it is subject to quicker degradation in the cell after transcription. In some embodiments, the element may include at least one AU-rich element (ARE). The AREs may be bound by ARE binding proteins (ARE-BPs) in a manner that is dependent upon tissue type, cell type, timing, cellular localization, and environment. In some embodiments the destabilizing element may promote RNA decay, affect RNA stability, or activate translation. In some embodiments, the ARE may comprise 50 to 150 nucleotides in length. In some embodiments, the ARE may comprise at least one copy of the sequence AUUUA. In some embodiments, at least one ARE may be added to the 3′ UTR of the RNA. In some embodiments, the element may be a Woodchuck Hepatitis Virus (WHP).

[0618] Posttranscriptional Regulatory Element (WPRE), which creates a tertiary structure to enhance expression from the transcript. In further embodiments, the element is a modified and/or truncated WPRE sequence that is capable of enhancing expression from the transcript, as described, for example in Zufferey et al., J Virol, 73(4): 2886-92 (1999) and Flajolet et al., J Virol, 72(7): 6175-80 (1998). In some embodiments, the WPRE or equivalent may be added to the 3′ UTR of the RNA. In some embodiments, the element may be selected from other RNA sequence motifs that are enriched in either fast- or slow-decaying transcripts.

[0619] In some embodiments, the vector encoding the PE or the PEgRNA may be self-destroyed via cleavage of a target sequence present on the vector by the PE system. The cleavage may prevent continued transcription of a PE or a PEgRNA from the vector. Although transcription may occur on the linearized vector for some amount of time, the expressed transcripts or proteins subject to intracellular degradation will have less time to produce off-target effects without continued supply from expression of the encoding vectors.

### [6] PEgRNAs

[0620] The prime editing system described herein contemplates the use of any suitable PEgRNAs. The inventors have discovered that the mechanism of target-primed reverse transcription (TPRT) can be leveraged or adapted for conducting precision and versatile CRISPR/Cas-based genome editing through the use of a specially configured guide RNA comprising a reverse transcription (RT) template sequence that codes for the desired nucleotide change. The application refers to this specially configured guide RNA as an “extended guide RNA” or a “PEgRNA” since the RT template sequence can be provided as an extension of a standard or traditional guide RNA molecule. The application contemplates any suitable configuration or arrangement for the extended guide RNA.

[0621] PEgRNA Architecture

[0622] FIG. 3A shows one embodiment of an extended guide RNA usable in the prime editing system disclosed herein whereby a traditional guide RNA (the dotted portion) includes a ˜20 nt protospacer sequence and a gRNA core region, which binds with the napDNAbp. In this embodiment, the guide RNA includes an extended RNA segment at the 5′ end, i.e., a 5′ extension. In this embodiment, the 5′ extension includes a reverse transcription template sequence, a reverse transcription primer binding site, and an optional 5-20 nucleotide linker sequence. As shown in FIGS. 1A-1B, the RT primer binding site hybrizes to the free 3′ end that is formed after a nick is formed in the non-target strand of the R-loop, thereby priming reverse transcriptase for DNA polymerization in the 5′-3′ direction.

[0623] FIG. 3B shows another embodiment of an extended guide RNA usable in the prime editing system disclosed herein whereby a traditional guide RNA (the dotted portion) includes a ˜20 nt protospacer sequence and a gRNA core, which binds with the napDNAbp. In this embodiment, the guide RNA includes an extended RNA segment at the 3′ end, i.e., a 3′ extension. In this embodiment, the 3′ extension includes a reverse transcription template sequence, and a reverse transcription primer binding site. As shown in FIGS. 1C-1D, the RT primer binding site hybrizes to the free 3′ end that is formed after a nick is formed in the non-target strand of the R-loop, thereby priming reverse transcriptase for DNA polymerization in the 5′-3′ direction.

[0624] FIG. 3C shows another embodiment of an extend guide RNA usable in the prime editing system disclosed herein whereby a traditional guide RNA (the dotted portion) includes a ˜20 nt protospacer sequence and a gRNA core, which binds with the napDNAbp. In this embodiment, the guide RNA includes an extended RNA segment at an intermolecular position within the gRNA core, i.e., an intramolecular extension. In this embodiment, the intramolecular extension includes a reverse transcription template sequence, and a reverse transcription primer binding site. The RT primer binding site hybrizes to the free 3′ end that is formed after a nick is formed in the non-target strand of the R-loop, thereby priming reverse transcriptase for DNA polymerization in the 5′-3′ direction.

[0625] In one embodiment, the position of the intermolecular RNA extension is not in the protospacer sequence of the guide RNA. In another embodiment, the position of the intermolecular RNA extension in the gRNA core. In still another embodiment, the position of the intermolecular RNA extension is any with the guide RNA molecule except within the protospacer sequence, or at a position which disrupts the protospacer sequence.

[0626] In one embodiment, the intermolecular RNA extension is inserted downstream from the 3′ end of the protospacer sequence. In another embodiment, the intermolecular RNA extension is inserted at least 1 nucleotide, at least 2 nucleotides, at least 3 nucleotides, at least 4 nucleotides, at least 5 nucleotides, at least 6 nucleotides, at least 7 nucleotides, at least 8 nucleotides, at least 9 nucleotides, at least 10 nucleotides, at least 11 nucleotides, at least 12 nucleotides, at least 13 nucleotides, at least 14 nucleotides, at least 15 nucleotides, at least 16 nucleotides, at least 17 nucleotides, at least 18 nucleotides, at least 19 nucleotides, at least 20 nucleotides, at least 21 nucleotides, at least 22 nucleotides, at least 23 nucleotides, at least 24 nucleotides, at least 25 nucleotides downstream of the 3′ end of the protospacer sequence.

[0627] In other embodiments, the intermolecular RNA extension is inserted into the gRNA, which refers to the portion of the guide RNA corresponding or comprising the tracrRNA, which binds and/or interacts with the Cas9 protein or equivalent thereof (i.e, a different napDNAbp). Preferably the insertion of the intermolecular RNA extension does not disrupt or minimally disrupts the interaction betweeen the tracrRNA portion and the napDNAbp.

[0628] The length of the RNA extension can be any useful length. In various embodiments, the RNA extension is at least 5 nucleotides, at least 6 nucleotides, at least 7 nucleotides, at least 8 nucleotides, at least 9 nucleotides, at least 10 nucleotides, at least 11 nucleotides, at least 12 nucleotides, at least 13 nucleotides, at least 14 nucleotides, at least 15 nucleotides, at least 16 nucleotides, at least 17 nucleotides, at least 18 nucleotides, at least 19 nucleotides, at least 20 nucleotides, at least 21 nucleotides, at least 22 nucleotides, at least 23 nucleotides, at least 24 nucleotides, at least 25 nucleotides, at least 30 nucleotides, at least 40 nucleotides, at least 50 nucleotides, at least 60 nucleotides, at least 70 nucleotides, at least 80 nucleotides, at least 90 nucleotides, at least 100 nucleotides, at least 200 nucleotides, at least 300 nucleotides, at least 400 nucleotides, or at least 500 nucleotides in length.

[0629] The RT template sequence can also be any suitable length. For example, the RT template sequence can be at least 3 nucleotides, at least 4 nucleotides, at least 5 nucleotides, at least 6 nucleotides, at least 7 nucleotides, at least 8 nucleotides, at least 9 nucleotides, at least 10 nucleotides, at least 11 nucleotides, at least 12 nucleotides, at least 13 nucleotides, at least 14 nucleotides, at least 15 nucleotides, at least 16 nucleotides, at least 17 nucleotides, at least 18 nucleotides, at least 19 nucleotides, at least 20 nucleotides, at least 30 nucleotides, at least 40 nucleotides, at least 50 nucleotides, at least 60 nucleotides, at least 70 nucleotides, at least 80 nucleotides, at least 90 nucleotides, at least 100 nucleotides, at least 200 nucleotides, at least 300 nucleotides, at least 400 nucleotides, or at least 500 nucleotides in length.

[0630] In still other embodiments, wherein the reverse transcription primer binding site sequence is at least 3 nucleotides, at least 4 nucleotides, at least 5 nucleotides, at least 6 nucleotides, at least 7 nucleotides, at least 8 nucleotides, at least 9 nucleotides, at least 10 nucleotides, at least 11 nucleotides, at least 12 nucleotides, at least 13 nucleotides, at least 14 nucleotides, at least 15 nucleotides, at least 16 nucleotides, at least 17 nucleotides, at least 18 nucleotides, at least 19 nucleotides, at least 20 nucleotides, at least 30 nucleotides, at least 40 nucleotides, at least 50 nucleotides, at least 60 nucleotides, at least 70 nucleotides, at least 80 nucleotides, at least 90 nucleotides, at least 100 nucleotides, at least 200 nucleotides, at least 300 nucleotides, at least 400 nucleotides, or at least 500 nucleotides in length.

[0631] In other embodiments, the optional linker or spacer sequence is at least 3 nucleotides, at least 4 nucleotides, at least 5 nucleotides, at least 6 nucleotides, at least 7 nucleotides, at least 8 nucleotides, at least 9 nucleotides, at least 10 nucleotides, at least 11 nucleotides, at least 12 nucleotides, at least 13 nucleotides, at least 14 nucleotides, at least 15 nucleotides, at least 16 nucleotides, at least 17 nucleotides, at least 18 nucleotides, at least 19 nucleotides, at least 20 nucleotides, at least 30 nucleotides, at least 40 nucleotides, at least 50 nucleotides, at least 60 nucleotides, at least 70 nucleotides, at least 80 nucleotides, at least 90 nucleotides, at least 100 nucleotides, at least 200 nucleotides, at least 300 nucleotides, at least 400 nucleotides, or at least 500 nucleotides in length.

[0632] The RT template sequence, in certain embodiments, encodes a single-stranded DNA molecule which is homologous to the non-target strand (and thus, complementary to the corresponding site of the target strand) but includes one or more nucleotide changes. The least one nucleotide change may include one or more single-base nucleotide changes, one or more deletions, and one or more insertions.

[0633] As depicted in FIG. 1G, the synthesized single-stranded DNA product of the RT template sequence is homologous to the non-target strand and contains one or more nucleotide changes. The single-stranded DNA product of the RT template sequence hybridizes in equilibrium with the complementary target strand sequence, thereby displacing the homologous endogenous target strand sequence. The displaced endogenous strand may be referred to in some embodiments as a 5′ endogenous DNA flap species (e.g., see FIG. 1E). This 5′ endogenous DNA flap species can be removed by a 5′ flap endonuclease (e.g., FEN1) and the single-stranded DNA product, now hybridized to the endogenous target strand, may be ligated, thereby creating a mismatch between the endogenous sequence and the newly synthesized strand. The mismatch may be resolved by the cell's innate DNA repair and/or replication processes.

[0634] In various embodiments, the nucleotide sequence of the RT template sequence corresponds to the nucleotide sequence of the non-target strand which becomes displaced as the 5′ flap species and which overlaps with the site to be edited.

[0635] In various embodiments of the extended guide RNAs, the reverse transcription template sequence may encode a single-strand DNA flap that is complementary to an endogenous DNA sequence adjacent to a nick site, wherein the single-strand DNA flap comprises a desired nucleotide change. The single-stranded DNA flap may displace an endogenous single-strand DNA at the nick site. The displaced endogenous single-strand DNA at the nick site can have a 5′ end and form an endogenous flap, which can be excised by the cell. In various embodiments, excision of the 5′ end endogenous flap can help drive product formation since removing the 5′ end endogenous flap encourages hybridization of the single-strand 3′ DNA flap to the corresponding complementary DNA strand, and the incorporation or assimilation of the desired nucleotide change carried by the single-strand 3′ DNA flap into the target DNA.

[0636] In various embodiments of the extended guide RNAs, the cellular repair of the single-strand DNA flap results in installation of the desired nucleotide change, thereby forming a desired product.

[0637] In still other embodiments, the desired nucleotide change is installed in an editing window that is between about −5 to +5 of the nick site, or between about −10 to +10 of the nick site, or between about −20 to +20 of the nick site, or between about −30 to +30 of the nick site, or between about −40 to +40 of the nick site, or between about −50 to +50 of the nick site, or between about −60 to +60 of the nick site, or between about −70 to +70 of the nick site, or between about −80 to +80 of the nick site, or between about −90 to +90 of the nick site, or between about −100 to +100 of the nick site, or between about −200 to +200 of the nick site.

[0638] In other embodiments, the desired nucleotide change is installed in an editing window that is between about +1 to +2 from the nick site, or about +1 to +3, +1 to +4, +1 to +5, +1 to +6, +1 to +7, +1 to +8, +1 to +9, +1 to +10, +1 to +11, +1 to +12, +1 to +13, +1 to +14, +1 to +15, +1 to +16, +1 to +17, +1 to +18, +1 to +19, +1 to +20, +1 to +21, +1 to +22, +1 to +23, +1 to +24, +1 to +25, +1 to +26, +1 to +27, +1 to +28, +1 to +29, +1 to +30, +1 to +31, +1 to +32, +1 to +33, +1 to +34, +1 to +35, +1 to +36, +1 to +37, +1 to +38, +1 to +39, +1 to +40, +1 to +41, +1 to +42, +1 to +43, +1 to +44, +1 to +45, +1 to +46, +1 to +47, +1 to +48, +1 to +49, +1 to +50, +1 to +51, +1 to +52, +1 to +53, +1 to +54, +1 to +55, +1 to +56, +1 to +57, +1 to +58, +1 to +59, +1 to +60, +1 to +61, +1 to +62, +1 to +63, +1 to +64, +1 to +65, +1 to +66, +1 to +67, +1 to +68, +1 to +69, +1 to +70, +1 to +71, +1 to +72, +1 to +73, +1 to +74, +1 to +75, +1 to +76, +1 to +77, +1 to +78, +1 to +79, +1 to +80, +1 to +81, +1 to +82, +1 to +83, +1 to +84, +1 to +85, +1 to +86, +1 to +87, +1 to +88, +1 to +89, +1 to +90, +1 to +90, +1 to +91, +1 to +92, +1 to +93, +1 to +94, +1 to +95, +1 to +96, +1 to +97, +1 to +98, +1 to +99, +1 to +100, +1 to +101, +1 to +102, +1 to +103, +1 to +104, +1 to +105, +1 to +106, +1 to +107, +1 to +108, +1 to +109, +1 to +110, +1 to +111, +1 to +112, +1 to +113, +1 to +114, +1 to +115, +1 to +116, +1 to +117, +1 to +118, +1 to +119, +1 to +120, +1 to +121, +1 to +122, +1 to +123, +1 to +124, or +1 to +125 from the nick site.

[0639] In still other embodiments, the desired nucleotide change is installed in an editing window that is between about +1 to +2 from the nick site, or about +1 to +5, +1 to +10, +1 to +15, +1 to +20, +1 to +25, +1 to +30, +1 to +35, +1 to +40, +1 to +45, +1 to +50, +1 to +55, +1 to +100, +1 to +105, +1 to +110, +1 to +115, +1 to +120, +1 to +125, +1 to +130, +1 to +135, +1 to +140, +1 to +145, +1 to +150, +1 to +155, +1 to +160, +1 to +165, +1 to +170, +1 to +175, +1 to +180, +1 to +185, +1 to +190, +1 to +195, or +1 to +200, from the nick site.

[0640] In various aspects, the extended guide RNAs are modified versions of a guide RNA. Guide RNAs maybe naturally occurring, expressed from an encoding nucleic acid, or synthesized chemically. Methods are well known in the art for obtaining or otherwise synthesizing guide RNAs and for determining the appropriate sequence of the guide RNA, including the protospacer sequence which interacts and hybridizes with the target strand of a genomic target site of interest.

[0641] In various embodiments, the particular design aspects of a guide RNA sequence will depend upon the nucleotide sequence of a genomic target site of interest (i.e., the desired site to be edited) and the type of napDNAbp (e.g., Cas9 protein) present in prime editing systems described herein, among other factors, such as PAM sequence locations, percent G/C content in the target sequence, the degree of microhomology regions, secondary structures, etc.

[0642] In general, a guide sequence is any polynucleotide sequence having sufficient complementarity with a target polynucleotide sequence to hybridize with the target sequence and direct sequence-specific binding of a napDNAbp (e.g., a Cas9, Cas9 homolog, or Cas9 variant) to the target sequence. In some embodiments, the degree of complementarity between a guide sequence and its corresponding target sequence, when optimally aligned using a suitable alignment algorithm, is about or more than about 50%, 60%, 75%, 80%, 85%, 90%, 95%, 97.5%, 99%, or more. Optimal alignment may be determined with the use of any suitable algorithm for aligning sequences, non-limiting example of which include the Smith-Waterman algorithm, the Needleman-Wunsch algorithm, algorithms based on the Burrows-Wheeler Transform (e.g., the Burrows Wheeler Aligner), ClustalW, Clustal X, BLAT, Novoalign (Novocraft Technologies, ELAND (Illumina, San Diego, Calif.), SOAP (available at soap.genomics.org.cn), and Maq (available at maq.sourceforge.net). In some embodiments, a guide sequence is about or more than about 5, 10, 11, 12, 13, 14, 15, 16, 17, 18, 19, 20, 21, 22, 23, 24, 25, 26, 27, 28, 29, 30, 35, 40, 45, 50, 75, or more nucleotides in length.

[0643] In some embodiments, a guide sequence is less than about 75, 50, 45, 40, 35, 30, 25, 20, 15, 12, or fewer nucleotides in length. The ability of a guide sequence to direct sequence-specific binding of a prime editor (PE) to a target sequence may be assessed by any suitable assay. For example, the components of a prime editor (PE), including the guide sequence to be tested, may be provided to a host cell having the corresponding target sequence, such as by transfection with vectors encoding the components of a prime editor (PE) disclosed herein, followed by an assessment of preferential cleavage within the target sequence, such as by Surveyor assay as described herein. Similarly, cleavage of a target polynucleotide sequence may be evaluated in a test tube by providing the target sequence, components of a prime editor (PE), including the guide sequence to be tested and a control guide sequence different from the test guide sequence, and comparing binding or rate of cleavage at the target sequence between the test and control guide sequence reactions. Other assays are possible, and will occur to those skilled in the art.

[0644] A guide sequence may be selected to target any target sequence. In some embodiments, the target sequence is a sequence within a genome of a cell. Exemplary target sequences include those that are unique in the target genome. For example, for the S. pyogenes Cas9, a unique target sequence in a genome may include a Cas9 target site of the form MMMMMMMMNNNNNNNNNNNNXGG (SEQ ID NO: 204) where NNNNNNNNNNNNXGG (SEQ ID NO: 205) (N is A, G, T, or C; and X can be anything). A unique target sequence in a genome may include an S. pyogenes Cas9 target site of the form MMMMMMMMMNNNNNNNNNNNXGG (SEQ ID NO: 206) where NNNNNNNNNNNXGG (SEQ ID NO: 207) (N is A, G, T, or C; and X can be anything). For the S. thermophilus CRISPR1Cas9, a unique target sequence in a genome may include a Cas9 target site of the form MMMMMMMMNNNNNNNNNNNNXXAGAAW (SEQ ID NO: 208) where NNNNNNNNNNNNXXAGAAW (SEQ ID NO: 209) (N is A, G, T, or C; X can be anything; and W is A or T). A unique target sequence in a genome may include an S. thermophilus CRISPR 1 Cas9 target site of the form MMMMMMMMMNNNNNNNNNNNXXAGAAW (SEQ ID NO: 210) where NNNNNNNNNNNXXAGAAW (SEQ ID NO: 211) (N is A, G, T, or C; X can be anything; and W is A or T). For the S. pyogenes Cas9, a unique target sequence in a genome may include a Cas9 target site of the form MMMMMMMMNNNNNNNNNNNNXGGXG (SEQ ID NO: 212) where NNNNNNNNNNNNXGGXG (SEQ ID NO: 213) (N is A, G, T, or C; and X can be anything). A unique target sequence in a genome may include an S. pyogenes Cas9 target site of the form MMMMMMMMMNNNNNNNNNNNXGGXG (SEQ ID NO: 214) where NNNNNNNNNNNXGGXG (SEQ ID NO: 215) (N is A, G, T, or C; and X can be anything). In each of these sequences “M” may be A, G, T, or C, and need not be considered in identifying a sequence as unique.

[0645] In some embodiments, a guide sequence is selected to reduce the degree of secondary structure within the guide sequence. Secondary structure may be determined by any suitable polynucleotide folding algorithm. Some programs are based on calculating the minimal Gibbs free energy. An example of one such algorithm is mFold, as described by Zuker and Stiegler (Nucleic Acids Res. 9 (1981), 133-148). Another example folding algorithm is the online webserver RNAfold, developed at Institute for Theoretical Chemistry at the University of Vienna, using the centroid structure prediction algorithm (see e.g. A. R. Gruber et al., 2008, Cell 106(1): 23-24; and PA Carr and GM Church, 2009, Nature Biotechnology 27(12): 1151-62). Further algorithms may be found in U.S. application Ser. No. 61/836,080; Broad Reference BI-2013/004A); incorporated herein by reference.

[0646] In general, a tracr mate sequence includes any sequence that has sufficient complementarity with a tracr sequence to promote one or more of: (1) excision of a guide sequence flanked by tracr mate sequences in a cell containing the corresponding tracr sequence; and (2) formation of a complex at a target sequence, wherein the complex comprises the tracr mate sequence hybridized to the tracr sequence. In general, degree of complementarity is with reference to the optimal alignment of the tracr mate sequence and tracr sequence, along the length of the shorter of the two sequences. Optimal alignment may be determined by any suitable alignment algorithm, and may further account for secondary structures, such as self-complementarity within either the tracr sequence or tracr mate sequence. In some embodiments, the degree of complementarity between the tracr sequence and tracr mate sequence along the length of the shorter of the two when optimally aligned is about or more than about 25%, 30%, 40%, 50%, 60%, 70%, 80%, 90%, 95%, 97.5%, 99%, or higher. In some embodiments, the tracr sequence is about or more than about 5, 6, 7, 8, 9, 10, 11, 12, 13, 14, 15, 16, 17, 18, 19, 20, 25, 30, 40, 50, or more nucleotides in length. In some embodiments, the tracr sequence and tracr mate sequence are contained within a single transcript, such that hybridization between the two produces a transcript having a secondary structure, such as a hairpin. Preferred loop forming sequences for use in hairpin structures are four nucleotides in length, and most preferably have the sequence GAAA. However, longer or shorter loop sequences may be used, as may alternative sequences. The sequences preferably include a nucleotide triplet (for example, AAA), and an additional nucleotide (for example C or G). Examples of loop forming sequences include CAAA and AAAG. In an embodiment of the invention, the transcript or transcribed polynucleotide sequence has at least two or more hairpins. In preferred embodiments, the transcript has two, three, four or five hairpins. In a further embodiment of the invention, the transcript has at most five hairpins. In some embodiments, the single transcript further includes a transcription termination sequence; preferably this is a polyT sequence, for example six T nucleotides. Further non-limiting examples of single polynucleotides comprising a guide sequence, a tracr mate sequence, and a tracr sequence are as follows (listed 5′ to 3′), where “N” represents a base of a guide sequence, the first block of lower case letters represent the tracr mate sequence, and the second block of lower case letters represent the tracr sequence, and the final poly-T sequence represents the transcription terminator:

(SEQ ID NO: 216)
(1)NNNNNNNNGTTTTTGTACTCTCAAGATTTAGAAATAAATCTTGCAG
AAGCTACAAAGATAAGGCTTCATGCCGAAATCAACACCCTGTCATTTTA
TGGCAGGGTGTTTTCGTTATTTAATTTTTT;
(SEQ ID NO: 217)
(2)NNNNNNNNNNNNNNNNNNGTTTTTGTACTCTCAGAAATGCAGAAGC
TACAAAGATAAGGCTTCATGCCGAAATCAACACCCTGTCATTTTATGGC
AGGGTGTTTTCGTTATTTAATTTTTT;
(SEQ ID NO: 218)
(3)NNNNNNNNNNNNNNNNNNNNGTTTTTGTACTCTCAGAAATGCAGAA
GCTACAAAGATAAGGCTTCATGCCGAAATCAACACCCTGTCATTTTATG
GCAGGGTGTTTTTT;
(SEQ ID NO: 219)
(4)NNNNNNNNNNNNNNNNNNNNGTTTTAGAGCTAGAAATAGCAAGTTA
AAATAAGGCTAGTCCGTTATCAACTTGAAAAAGTGGCACCGAGTCGGTG
CTTTTTT;
(SEQ ID NO: 220)
(5)NNNNNNNNNNNNNNNNNNNNGTTTTAGAGCTAGAAATAGCAAGTTA
AAATAAGGCTAGTCCGTTATCAACTTGAAAAAGTGTTTTTTT;
AND
(SEQ ID NO: 221)
(6)NNNNNNNNNNNNNNNNNNNNGTTTTAGAGCTAGAAATAGCAAGTTA
AAATAAGGCTAGTCCGTTATCATTTTTTTT.

[0647] In some embodiments, sequences (1) to (3) are used in combination with Cas9 from S. thermophilus CRISPR1. In some embodiments, sequences (4) to (6) are used in combination with Cas9 from S. pyogenes. In some embodiments, the tracr sequence is a separate transcript from a transcript comprising the tracr mate sequence.

[0648] It will be apparent to those of skill in the art that in order to target any of the fusion proteins comprising a Cas9 domain and a single-stranded DNA binding protein, as disclosed herein, to a target site, e.g., a site comprising a point mutation to be edited, it is typically necessary to co-express the fusion protein together with a guide RNA, e.g., an sgRNA. As explained in more detail elsewhere herein, a guide RNA typically comprises a tracrRNA framework allowing for Cas9 binding, and a guide sequence, which confers sequence specificity to the Cas9:nucleic acid editing enzyme/domain fusion protein.

[0649] In some embodiments, the guide RNA comprises a structure 5′-[guide sequence]-GUUUUAGAGCUAGAAAUAGCAAGUUAAAAUAAAGGCUAGUCCGUUAUCAACU UGAAAAAGUGGCACCGAGUCGGUGCUUUUU-3′ (SEQ ID NO: 222), wherein the guide sequence comprises a sequence that is complementary to the target sequence. The guide sequence is typically 20 nucleotides long. The sequences of suitable guide RNAs for targeting Cas9:nucleic acid editing enzyme/domain fusion proteins to specific genomic target sites will be apparent to those of skill in the art based on the instant disclosure. Such suitable guide RNA sequences typically comprise guide sequences that are complementary to a nucleic sequence within 50 nucleotides upstream or downstream of the target nucleotide to be edited. Some exemplary guide RNA sequences suitable for targeting any of the provided fusion proteins to specific target sequences are provided herein. Additional guide sequences are well known in the art and can be used with the prime editor (PE) described herein.

[0650] In other embodiments, the PEgRNAs include those depicted in FIG. 3D.

[0651] In still other embodiments, the PEgRNAs may include those depicted in FIG. 3E.

[0652] FIG. 3D provides the structure of an embodiment of a PEgRNA contemplated herein and which may be designed in accordance with the methodology defined in Example 2. The PEgRNA comprises three main component elements ordered in the 5′ to 3′ direction, namely: a spacer, a gRNA core, and an extension arm at the 3′ end. The extension arm may further be divided into the following structural elements in the 5′ to 3′ direction, namely: a primer binding site (A), an edit template (B), and a homology arm (C). In addition, the PEgRNA may comprise an optional 3′ end modifier region (e1) and an optional 5′ end modifier region (e2). Still further, the PEgRNA may comprise a transcriptional termination signal at the 3′ end of the PEgRNA (not depicted). These structural elements are further defined herein. The depiction of the structure of the PEgRNA is not meant to be limiting and embraces variations in the arrangement of the elements. For example, the optional sequence modifiers (e1) and (e2) could be positioned within or between any of the other regions shown, and not limited to being located at the 3′ and 5′ ends.

[0653] FIG. 3E provides the structure of another embodiment of a PEgRNA contemplated herein and which may be designed in accordance with the methodology defined in Example 2. The PEgRNA comprises three main component elements ordered in the 5′ to 3′ direction, namely: a spacer, a gRNA core, and an extension arm at the 3′ end. The extension arm may further be divided into the following structural elements in the 5′ to 3′ direction, namely: a primer binding site (A), an edit template (B), and a homology arm (C). In addition, the PEgRNA may comprise an optional 3′ end modifier region (e1) and an optional 5′ end modifier region (e2). Still further, the PEgRNA may comprise a transcriptional termination signal on the 3′ end of the PEgRNA (not depicted). These structural elements are further defined herein. The depiction of the structure of the PEgRNA is not meant to be limiting and embraces variations in the arrangement of the elements. For example, the optional sequence modifiers (e1) and (e2) could be positioned within or between any of the other regions shown, and not limited to being located at the 3′ and 5′ ends.

[0654] PEgRNA Improvements

[0655] The PEgRNAs may also include additional design improvements that may modify the properties and/or characteristics of PEgRNAs thereby improving the efficacy of prime editing. In various embodiments, these improvements may belong to one or more of a number of different categories, including but not limited to: (1) designs to enable efficient expression of functional PEgRNAs from non-polymerase III (pol III) promoters, which would enable the expression of longer PEgRNAs without burdensome sequence requirements; (2) improvements to the core, Cas9-binding PEgRNA scaffold, which could improve efficacy; (3) modifications to the PEgRNA to improve RT processivity, enabling the insertion of longer sequences at targeted genomic loci; and (4) addition of RNA motifs to the 5′ or 3′ termini of the PEgRNA that improve PEgRNA stability, enhance RT processivity, prevent misfolding of the PEgRNA, or recruit additional factors important for genome editing.

[0656] In one embodiment, PEgRNA could be designed with polIII promoters to improve the expression of longer-length PEgRNA with larger extension arms. sgRNAs are typically expressed from the U6 snRNA promoter. This promoter recruits pol III to express the associated RNA and is useful for expression of short RNAs that are retained within the nucleus. However, pol III is not highly processive and is unable to express RNAs longer than a few hundred nucleotides in length at the levels required for efficient genome editing. Additionally, pol III can stall or terminate at stretches of U's, potentially limiting the sequence diversity that could be inserted using a PEgRNA. Other promoters that recruit polymerase II (such as pCMV) or polymerase I (such as the U1 snRNA promoter) have been examined for their ability to express longer sgRNAs. However, these promoters are typically partially transcribed, which would result in extra sequence 5′ of the spacer in the expressed PEgRNA, which has been shown to result in markedly reduced Cas9:sgRNA activity in a site-dependent manner. Additionally, while pol III-transcribed PEgRNAs can simply terminate in a run of 6-7 U's, PEgRNAs transcribed from pol II or pol I would require a different termination signal. Often such signals also result in polyadenylation, which would result in undesired transport of the PEgRNA from the nucleus. Similarly, RNAs expressed from pol II promoters such as pCMV are typically 5′-capped, also resulting in their nuclear export.

[0657] Previously, Rinn and coworkers screened a variety of expression platforms for the production of long-noncoding RNA-(lncRNA) tagged sgRNAs¹⁸³. These platforms include RNAs expressed from pCMV and that terminate in the ENE element from the MALAT1 ncRNA from humans¹⁸⁴, the PAN ENE element from KSHV¹⁸⁵, or the 3′ box from U1 snRNA¹⁸⁶. Notably, the MALAT1 ncRNA and PAN ENEs form triple helices protecting the polyA-tail ^{184,187} These constructs could also enhance RNA stability. It is contemplated that these expression systems will also enable the expression of longer PEgRNAs.

[0658] In addition, a series of methods have been designed for the cleavage of the portion of the pol II promoter that would be transcribed as part of the PEgRNA, adding either a self-cleaving ribozyme such as the hammerhead¹⁸⁸, pistol¹⁸⁹, hatchet¹⁸⁹, hairpin¹⁹⁰, VS¹⁹¹, twister¹⁹², or twister sister¹⁹² ribozymes, or other self-cleaving elements to process the transcribed guide, or a hairpin that is recognized by Csy4¹⁹³ and also leads to processing of the guide. Also, it is hypothesized that incorporation of multiple ENE motifs could lead to improved PEgRNA expression and stability, as previously demonstrated for the KSHV PAN RNA and element¹⁸⁵. It is also anticipated that circularizing the PEgRNA in the form of a circular intronic RNA (ciRNA) could also lead to enhanced RNA expression and stability, as well as nuclear localization¹⁹⁴.

[0659] In various embodiments, the PEgRNA may include various above elements, as exemplified by the following sequence.

Non-limiting example 1 - PEgRNA expression platform
consisting of pCMV, Csy4 hairpin, the PEgRNA, and
MALAT1 ENE
(SEQ ID NO: 223)
TAGTTATTAATAGTAATCAATTACGGGGTCATTAGTTCATAGCCCATATAT
GGAGTTCCGCGTTACATAACTTACGGTAAATGGCCCGCCTGGCTGACCGCC
CAACGACCCCCGCCCATTGACGTCAATAATGACGTATGTTCCCATAGTAAC
GCCAATAGGGACTTTCCATTGACGTCAATGGGTGGAGTATTTACGGTAAAC
TGCCCACTTGGCAGTACATCAAGTGTATCATATGCCAAGTACGCCCCCTAT
TGACGTCAATGACGGTAAATGGCCCGCCTGGCATTATGCCCAGTACATGAC
CTTATGGGACTTTCCTACTTGGCAGTACATCTACGTATTAGTCATCGCTAT
TACCATGGTGATGCGGTTTTGGCAGTACATCAATGGGCGTGGATAGCGGTT
TGACTCACGGGGATTTCCAAGTCTCCACCCCATTGACGTCAATGGGAGTTT
GTTTTGGCACCAAAATCAACGGGACTTTCCAAAATGTCGTAACAACTCCGC
CCCATTGACGCAAATGGGCGGTAGGCGTGTACGGTGGGAGGTCTATATAAG
CAGAGCTGGTTTAGTGAACCGTCAGATCGTTCACTGCCGTATAGGCAGGGC
CCAGACTGAGCACGTGAGTTTTAGAGCTAGAAATAGCAAGTTAAAATAAGG
CTAGTCCGTTATCAACTTGAAAAAGTGGGACCGAGTCGGTCCTCTGCCATC
AAAGCGTGCTCAGTCTGTTTTAGGGTCATGAAGGTTTTTCTTTTCCTGAGA
AAACAACACGTATTGTTTTCTCAGGTTTTGCTTTTTGGCCTTTTTCTAGCT
TAAAAAAAAAAAAAGCAAAAGATGCTGGTGGTTGGCACTCCTGGTTTCCAG
GACGGGGTTCAAATCCCTGCGGCGTCTTTGCTTTGACT
Non-limiting example 2 - PEgRNA expression platform
consisting of pCMV, Csy4 hairing, the PEgRNA, and
PAN ENE
(SEQ ID NO: 224)
TAGTTATTAATAGTAATCAATTACGGGGTCATTAGTTCATAGCCCAT
ATATGGAGTTCCGCGTTACATAACTTACGGTAAATGGCCCGCCTGGCTGAC
CGCCCAACGACCCCCGCCCATTGACGTCAATAATGACGTATGTTCCCATAG
TAACGCCAATAGGGACTTTCCATTGACGTCAATGGGTGGAGTATTTACGGT
AAACTGCCCACTTGGCAGTACATCAAGTGTATCATATGCCAAGTACGCCCC
CTATTGACGTCAATGACGGTAAATGGCCCGCCTGGCATTATGCCCAGTACA
TGACCTTATGGGACTTTCCTACTTGGCAGTACATCTACGTATTAGTCATCG
CTATTACCATGGTGATGCGGTTTTGGCAGTACATCAATGGGCGTGGATAGC
GGTTTGACTCACGGGGATTTCCAAGTCTCCACCCCATTGACGTCAATGGGA
GTTTGTTTTGGCACCAAAATCAACGGGACTTTCCAAAATGTCGTAACAACT
CCGCCCCATTGACGCAAATGGGCGGTAGGCGTGTACGGTGGGAGGTCTATA
TAAGCAGAGCTGGTTTAGTGAACCGTCAGATCGTTCACTGCCGTATAGGCA
GGGCCCAGACTGAGCACGTGAGTTTTAGAGCTAGAAATAGCAAGTTAAAAT
AAGGCTAGTCCGTTATCAACTTGAAAAAGTGGGACCGAGTCGGTCCTCTGC
CATCAAAGCGTGCTCAGTCTGTTTTGTTTTGGCTGGGTTTTTCCTTGTTCG
CACCGGACACCTCCAGTGACCAGACGGCAAGGTTTTTATCCCAGTGTATAT
TGGAAAAACATGTTATACTTTTGACAATTTAACGTGCCTAGAGCTCAAATT
AAACTAATACCATAACGTAATGCAACTTACAACATAAATAAAGGTCAATGT
TTAATCCATAAAAAAAAAAAAAAAAAAA
Non-limiting example 3 - PEgRNA expression platform
consisting of pCMV, Csy4 hairing, the PEgRNA,
and 3xPAN ENE
(SEQ ID NO: 225)
TAGTTATTAATAGTAATCAATTACGGGGTCATTAGTTCATAGCCCATATAT
GGAGTTCCGCGTTACATAACTTACGGTAAATGGCCCGCCTGGCTGACCGCC
CAACGACCCCCGCCCATTGACGTCAATAATGACGTATGTTCCCATAGTAAC
GCCAATAGGGACTTTCCATTGACGTCAATGGGTGGAGTATTTACGGTAAAC
TGCCCACTTGGCAGTACATCAAGTGTATCATATGCCAAGTACGCCCCCTAT
TGACGTCAATGACGGTAAATGGCCCGCCTGGCATTATGCCCAGTACATGAC
CTTATGGGACTTTCCTACTTGGCAGTACATCTACGTATTAGTCATCGCTAT
TACCATGGTGATGCGGTTTTGGCAGTACATCAATGGGCGTGGATAGCGGTT
TGACTCACGGGGATTTCCAAGTCTCCACCCCATTGACGTCAATGGGAGTTT
GTTTTGGCACCAAAATCAACGGGACTTTCCAAAATGTCGTAACAACTCCGC
CCCATTGACGCAAATGGGCGGTAGGCGTGTACGGTGGGAGGTCTATATAAG
CAGAGCTGGTTTAGTGAACCGTCAGATCGTTCACTGCCGTATAGGCAGGGC
CCAGACTGAGCACGTGAGTTTTAGAGCTAGAAATAGCAAGTTAAAATAAGG
CTAGTCCGTTATCAACTTGAAAAAGTGGGACCGAGTCGGTCCTCTGCCATC
AAAGCGTGCTCAGTCTGTTTTGTTTTGGCTGGGTTTTTCCTTGTTCGCACC
GGACACCTCCAGTGACCAGACGGCAAGGTTTTTATCCCAGTGTATATTGGA
AAAACATGTTATACTTTTGACAATTTAACGTGCCTAGAGCTCAAATTAAAC
TAATACCATAACGTAATGCAACTTACAACATAAATAAAGGTCAATGTTTAA
TCCATAAAAAAAAAAAAAAAAAAAACACACTGTTTTGGCTGGGTTTTTCCT
TGTTCGCACCGGACACCTCCAGTGACCAGACGGCAAGGTTTTTATCCCAGT
GTATATTGGAAAAACATGTTATACTTTTGACAATTTAACGTGCCTAGAGCT
CAAATTAAACTAATACCATAACGTAATGCAACTTACAACATAAATAAAGGT
CAATGTTTAATCCATAAAAAAAAAAAAAAAAAAATCTCTCTGTTTTGGCTG
GGTTTTTCCTTGTTCGCACCGGACACCTCCAGTGACCAGACGGCAAGGTTT
TTATCCCAGTGTATATTGGAAAAACATGTTATACTTTTGACAATTTAACGT
GCCTAGAGCTCAAATTAAACTAATACCATAACGTAATGCAACTTACAACAT
AAATAAAGGTCAATGTTTAATCCATAAAAAAAAAAAAAAAAAAA
Non-limiting example 4 - PEgRNA expression platform
consisting of pCMV, Csy4 hairing, the PEgRNA,
and 3′ box
(SEQ ID NO: 226)
TAGTTATTAATAGTAATCAATTACGGGGTCATTAGTTCATAGCCCATATAT
GGAGTTCCGCGTTACATAACTTACGGTAAATGGCCCGCCTGGCTGACCGCC
CAACGACCCCCGCCCATTGACGTCAATAATGACGTATGTTCCCATAGTAAC
GCCAATAGGGACTTTCCATTGACGTCAATGGGTGGAGTATTTACGGTAAAC
TGCCCACTTGGCAGTACATCAAGTGTATCATATGCCAAGTACGCCCCCTAT
TGACGTCAATGACGGTAAATGGCCCGCCTGGCATTATGCCCAGTACATGAC
CTTATGGGACTTTCCTACTTGGCAGTACATCTACGTATTAGTCATCGCTAT
TACCATGGTGATGCGGTTTTGGCAGTACATCAATGGGCGTGGATAGCGGTT
TGACTCACGGGGATTTCCAAGTCTCCACCCCATTGACGTCAATGGGAGTTT
GTTTTGGCACCAAAATCAACGGGACTTTCCAAAATGTCGTAACAACTCCGC
CCCATTGACGCAAATGGGCGGTAGGCGTGTACGGTGGGAGGTCTATATAAG
CAGAGCTGGTTTAGTGAACCGTCAGATCGTTCACTGCCGTATAGGCAGGGC
CCAGACTGAGCACGTGAGTTTTAGAGCTAGAAATAGCAAGTTAAAATAAGG
CTAGTCCGTTATCAACTTGAAAAAGTGGGACCGAGTCGGTCCTCTGCCATC
AAAGCGTGCTCAGTCTGTTTGTTTCAAAAGTAGACTGTACGCTAAGGGTCA
TATCTTTTTTTGTTTGGTTTGTGTCTTGGTTGGCGTCTTAAA
Non-limiting example 5 - PEgRNA expression platform
consisting of pU1, Csy4 hairping, the PEgRNA,
and 3′ box
(SEQ ID NO: 227)
CTAAGGACCAGCTTCTTTGGGAGAGAACAGACGCAGGGGCGGGAGGGAAA
AAGGGAGAGGCAGACGTCACTTCCCCTTGGCGGCTCTGGCAGCAGATTGGT
CGGTTGAGTGGCAGAAAGGCAGACGGGGACTGGGCAAGGCACTGTCGGTGA
CATCACGGACAGGGCGACTTCTATGTAGATGAGGCAGCGCAGAGGCTGCTG
CTTCGCCACTTGCTGCTTCACCACGAAGGAGTTCCCGTGCCCTGGGAGCGG
GTTCAGGACCGCTGATCGGAAGTGAGAATCCCAGCTGTGTGTCAGGGCTGG
AAAGGGCTCGGGAGTGCGCGGGGCAAGTGACCGTGTGTGTAAAGAGTGAGG
CGTATGAGGCTGTGTCGGGGCAGAGGCCCAAGATCTCAGTTCACTGCCGTA
TAGGCAGGGCCCAGACTGAGCACGTGAGTTTTAGAGCTAGAAATAGCAAGT
TAAAATAAGGCTAGTCCGTTATCAACTTGAAAAAGTGGGACCGAGTCGGTC
CTCTGCCATCAAAGCGTGCTCAGTCTGTTTCAGCAAGTTCAGAGAAATCTG
AACTTGCTGGATTTTTGGAGCAGGGAGATGGAATAGGAGCTTGCTCCGTCC
ACTCCACGCATCGACCTGGTATTGCAGTACCTCCAGGAACGGTGCACCCAC
TTTCTGGAGTTTCAAAAGTAGACTGTACGCTAAGGGTCATATCTTTTTTTG
TTTGGTTTGTGTCTTGGTTGGCGTCTTAAA.

[0660] In various other embodiments, the PEgRNA may be improved by introducing improvements to the scaffold or core sequences. This can be done by introducing known

[0661] The core, Cas9-binding PEgRNA scaffold can likely be improved to enhance PE activity. Several such approaches have already been demonstrated. For instance, the first pairing element of the scaffold (P1) contains a GTTTT-AAAAC (SEQ ID NO: 3939) pairing element. Such runs of Ts have been shown to result in pol III pausing and premature termination of the RNA transcript. Rational mutation of one of the T-A pairs to a G-C pair in this portion of P1 has been shown to enhance sgRNA activity, suggesting this approach would also be feasible for PEgRNAs¹⁹⁵. Additionally, increasing the length of P1 has also been shown to enhance sgRNA folding and lead to improved activity¹⁹⁵, suggesting it as another avenue for the improvement of PEgRNA activity. Example improvements to the core can include:

PEgRNA containing a 6 nt extension to P1
(SEQ ID NO: 228)
GGCCCAGACTGAGCACGTGAGTTTTAGAGCTAGCTCATGAAAATGAGCTA
GCAAGTTAAAATAAGGCTAGTCCGTTATCAACTTGAAAAAGTGGGACCGA
GTCGGTCCTCTGCCATCAAAGCGTGCTCAGTCTGTTTTTTT
PEgRNA containing a T-A to G-C mutation within P1
(SEQ ID NO: 229)
GGCCCAGACTGAGCACGTGAGTTTGAGAGCTAGAAATAGCAAGTTTAAAT
AAGGCTAGTCCGTTATCAACTTGAAAAAGTGGGACCGAGTCGGTCCTCTG
CCATCAAAGCGTGCTCAGTCTGTTTTTTT

[0662] In various other embodiments, the PEgRNA may be improved by introducing modifications to the edit template region. As the size of the insertion templated by the PEgRNA increases, it is more likely to be degraded by endonucleases, undergo spontaneous hydrolysis, or fold into secondary structures unable to be reverse-transcribed by the RT or that disrupt folding of the PEgRNA scaffold and subsequent Cas9-RT binding. Accordingly, it is likely that modification to the template of the PEgRNA might be necessary to affect large insertions, such as the insertion of whole genes. Some strategies to do so include the incorporation of modified nucleotides within a synthetic or semi-synthetic PEgRNA that render the RNA more resistant to degradation or hydrolysis or less likely to adopt inhibitory secondary structures¹⁹⁶. Such modifications could include 8-aza-7-deazaguanosine, which would reduce RNA secondary structure in G-rich sequences; locked-nucleic acids (LNA) that reduce degradation and enhance certain kinds of RNA secondary structure; 2′-O-methyl, 2′-fluoro, or 2′-O-methoxyethoxy modifications that enhance RNA stability. Such modifications could also be included elsewhere in the PEgRNA to enhance stability and activity. Alternatively or additionally, the template of the PEgRNA could be designed such that it both encodes for a desired protein product and is also more likely to adopt simple secondary structures that are able to be unfolded by the RT. Such simple structures would act as a thermodynamic sink, making it less likely that more complicated structures that would prevent reverse transcription would occur. Finally, one could also split the template into two, separate PEgRNAs. In such a design, a PE would be used to initiate transcription and also recruit a separate template RNA to the targeted site via an RNA-binding protein fused to Cas9 or an RNA recognition element on the PEgRNA itself such as the MS2 aptamer. The RT could either directly bind to this separate template RNA, or initiate reverse transcription on the original PEgRNA before swapping to the second template. Such an approach could enable long insertions by both preventing misfolding of the PEgRNA upon addition of the long template and also by not requiring dissociation of Cas9 from the genome for long insertions to occur, which could possibly be inhibiting PE-based long insertions.

[0663] In still other embodiments, the PEgRNA may be improved by introducing additional RNA motifs at the 5′ and 3′ termini of the PEgRNAs, or even at positions therein between (e.g., in the gRNA core region, or the the spacer). Several such motifs—such as the PAN ENE from KSHV and the ENE from MALAT1 were discussed above as possible means to terminate expression of longer PEgRNAs from non-pol III promoters. These elements form RNA triple helices that engulf the polyA tail, resulting in their being retained within the nucleus^{184,187}. However, by forming complex structures at the 3′ terminus of the PEgRNA that occlude the terminal nucleotide, these structures would also likely help prevent exonuclease-mediated degradation of PEgRNAs.

[0664] Other structural elements inserted at the 3′ terminus could also enhance RNA stability, albeit without enabling termination from non-pol III promoters. Such motifs could include hairpins or RNA quadruplexes that would occlude the 3′ terminus¹⁹⁷, or self-cleaving ribozymes such as HDV that would result in the formation of a 2′-3′-cyclic phosphate at the 3′ terminus and also potentially render the PEgRNA less likely to be degraded by exonucleases¹⁹⁸. Inducing the PEgRNA to cyclize via incomplete splicing—to form a ciRNA—could also increase PEgRNA stability and result in the PEgRNA being retained within the nucleus¹⁹⁴.

[0665] Additional RNA motifs could also improve RT processivity or enhance PEgRNA activity by enhancing RT binding to the DNA-RNA duplex. Addition of the native sequence bound by the RT in its cognate retroviral genome could enhance RT activity¹⁹⁹. This could include the native primer binding site (PBS), polypurine tract (PPT), or kissing loops involved in retroviral genome dimerization and initiation of transcription¹⁹⁹.

[0666] Addition of dimerization motifs—such as kissing loops or a GNRA tetraloop/tetraloop receptor pair²⁰⁰—at the 5′ and 3′ termini of the PEgRNA could also result in effective circularization of the PEgRNA, improving stability. Additionally, it is envisioned that addition of these motifs could enable the physical separation of the PEgRNA spacer and primer, prevention occlusion of the spacer which would hinder PE activity. Short 5′ extensions or 3′ extensions to the PEgRNA that form a small toehold hairpin in the spacer region or along the primer binding site could also compete favorably against the annealing of intracomplementary regions along the length of the PEgRNA, e.g., the interaction between the spacer and the primer binding site that can occur.Finally, kissing loops could also be used to recruit other template RNAs to the genomic site and enable swapping of RT activity from one RNA to the other. As exemplary embodiments of various secondary structures, the PEgRNA depicted in FIG. 3D and FIG. 3E list a number secondary RNA structures that may be engineered into any region of the PEgRNA, including in the terminal portions of the extension arm (i.e., eland e2), as shown.

[0667] Example improvements include, but are not limited to:

PEgRNA-HDV fusion
(SEQ ID NO: 230)
GGCCCAGACTGAGCACGTGAGTTTTAGAGCTAGAAATAGCAAGTTAAAAT
AAGGCTAGTCCGTTATCAACTTGAAAAAGTGGGACCGAGTCGGTCCTCTG
CCATCAAAGCGTGCTCAGTCTGGGCCGGCATGGTCCCAGCCTCCTCGCTG
GCGCCGGCTGGGCAACATGCTTCGGCATGGCGAATGGGACTTTTTTT
PEgRNA-MMLV kissing loop
(SEQ ID NO: 231)
GGTGGGAGACGTCCCACCGGCCCAGACTGAGCACGTGAGTTTTAGAGCTA
GAAATAGCAAGTTAAAATAAGGCTAGTCCGTTATCAACTTGAAAAAGTGG
GACCGAGTCGGTCCTCTGCCATCAAAGCTTCGACCGTGCTCAGTCTGGTG
GGAGACGTCCCACCTTTTTTT
PEgRNA-VS ribozyme kissing loop
(SEQ ID NO: 232)
GAGCAGCATGGCGTCGCTGCTCACGGCCCAGACTGAGCACGTGAGTTTTA
GAGCTAGAAATAGCAAGTTAAAATAAGGCTAGTCCGTTATCAACTTGAAA
AAGTGGGACCGAGTCGGTCCTCTGCCATCAAAGCTTCGACCGTGCTCAGT
CTCCATCAGTTGACACCCTGAGGTTTTTTT
PEgRNA-GNRA tetraloop/tetraloop receptor
(SEQ ID NO: 233)
GCAGACCTAAGTGGUGACATATGGTCTGGGCCCAGACTGAGCACGTGAGT
TTTAGAGCTAUACGTAGCAAGTTAAAATAAGGCTAGTCCGTTATCAACTT
UACGAAGTGGGACCGAGTCGGTCCTCTGCCATCAAAGCTTCGACCGTGCT
CAGTCTGCATGCGATTAGAAATAATCGCATGTTTTTTT
PEgRNA template switching secondary RNA-HDV fusion
(SEQ ID NO: 234)
TCTGCCATCAAAGCTGCGACCGTGCTCAGTCTGGTGGGAGACGTCCCACC
GGCCGGCATGGTCCCAGCCTCCTCGCTGGCGCCGGCTGGGCAACATGCTT
CGGCATGGCGAATGGGACTTTTTTT

[0668] PEgRNA scaffold could be further improved via directed evolution, in an analogous fashion to how SpCas9 and prime editor (PE) have been improved. Directed evolution could enhance PEgRNA recognition by Cas9 or evolved Cas9 variants. Additionally, it is likely that different PEgRNA scaffold sequences would be optimal at different genomic loci, either enhancing PE activity at the site in question, reducing off-target activities, or both. Finally, evolution of PEgRNA scaffolds to which other RNA motifs have been added would almost certainly improve the activity of the fused PEgRNA relative to the unevolved, fusion RNA. For instance, evolution of allosteric ribozymes composed of c-di-GMP-I aptamers and hammerhead ribozymes led to dramatically improved activity²⁰², suggesting that evolution would improve the activity of hammerhead-PEgRNA fusions as well. In addition, while Cas9 currently does not generally tolerate 5′ extension of the sgRNA, directed evolution will likely generate enabling mutations that mitigate this intolerance, allowing additional RNA motifs to be utilized.

[0669] The present disclosure contemplates any such ways to further improve the efficacy of the prime editing systems disclosed here.

[0670] In various embodiments, it may be advantageous to limit the appearance of consecutive sequence of Ts from the extension arm as consecutive series of T's may limit the capacity of the PEgRNA to be transcribed. For example, strings of at least consecutive three T's, at least consecutive four T's, at least consecutive five T's, at least consecutive six T's, at least consecutive seven T's, at least consecutive eight T's, at least consecutive nine T's, at least consecutive ten T's, at least consecutive eleven T's, at least consecutive twelve T's, at least consecutive thirteen T's, at least consecutive fourteen T's, or at least consecutive fifteen T's should be avoided when designing the PEgRNA, or should be at least removed from the final designed sequence. In one embodiment, one can avoid the includes of unwanted strings of consecutive T's in PEgRNA extension arms but avoiding target sites that are rich in consecutive A:T nucleobase pairs.

[0671] Split PEgRNA Designs for Trans Prime Editing

[0672] The instant disclosure also contemplates trans prime editing, which refers to a modified version of prime editing which operates by separating the PEgRNA into two distinct molecules: a guide RNA and a tPERT molecule. The tPERT molecule is programmed to co-localize with the prime editor complex at a target DNA site, bringing the primer binding site and the DNA synthesis template to the prime editor in trans. For example, see FIG. 3G for an embodiment of a trans prime editor (tPE) which shows a two-component system comprising (1) an recruiting protein (RP)-PE:gRNA complex and (2) a tPERT that includes a primer binding site and a DNA synthesis template joined to an RNA-protein recruitment domain (e.g., stem loop or hairpin), wherein the recruiting protein component of the RP-PE:gRNA complex recruits the tPERT to a target site to be edited, thereby associating the PBS and DNA synthesis template with the prime editor in trans. Said another way, the tPERT is engineered to contain (all or part of) the extension arm of a PEgRNA, which includes the primer binding site and the DNA synthesis template. One advantage of this approach is to separate the extension arm of a PEgRNA from the guide RNA, thereby minimizing annealing interactions that tend to occur between the PBS of the extension arm and the spacer sequence of the guide RNA.

[0673] A key feature of trans prime editing is the ability of the trans prime editor to recruit the tPERT to the site of DNA editing, thereby effectively co-localizing all of the functions of a PEgRNA at the site of prime editing. Recruitment can be achieve by installing an RNA-protein recruitment domain, such as a MS2 aptamer, into the tPERT and fusing a corresponding recruiting protein to the prime editor (e.g., via a linker to the napDNAbp or via a linker to the polymerase) that is capable of specifically binding to the RNA-protein recruitment domain, thereby recruiting the tPERT molecule to the prime editor complex. As depicted in the process described in FIG. 3H, the RP-PE:gRNA complex binds to and nicks the target DNA sequence. Then, the recruiting protein (RP) recruits a tPERT to co-localize to the prime editor complex bound to the DNA target site, thereby allowing the primer binding site, located on the tPERT, to bind to the primer sequence on the nicked strand, and subsequently, allowing the polymerase (e.g., RT) to synthesize a single strand of DNA against the DNA synthesis template, located on the tPERT, up through the 5′ end of the tPERT.

[0674] While the tPERT is shown in FIG. 3G and FIG. 3H as comprising the PBS and DNA synthesis template on the 5′ end of the RNA-protein recruitment domain, the tPERT in other configurations may be designed with the PBS and DNA synthesis template located on the 3′ end of the RNA-protein recruitment domain. However, the tPERT with the 5′ extension has the advantage that synthesis of the single strand of DNA will naturally terminate at the 5′ end of the tPERT and thus, does not risk using any portion of the RNA-protein recruitment domain as a template during the DNA synthesis stage of prime editing.

[0675] PEgRNA Design Method

[0676] The present disclosure also relates to methods for designing PEgRNAs.

[0677] In one aspect of design, the design approach can take into account the particular application for which prime editing is being used. For instance, and as exemplied and discussed herein, prime editing can be used, without limitation, to (a) install mutation-correcting changes to a nucleotide sequence, (b) install protein and RNA tags, (c) install immunoepitopes on proteins of interest, (d) install inducible dimerization domains in proteins, (e) install or remove sequences to alter that activity of a biomolecule, (f) install recombinase target sites to direct specific genetic changes, and (g) mutagenesis of a target sequence by using an error-prone RT. In addition to these methods which, in general, insert, change, or delete nucleotide sequences at target sites of interest, prime editors can also be used to construct highly programmable libraries, as well as to conduct cell data recording and lineage tracing studies. In these various uses, there may be as described herein particular design aspects pertaining to the preparation of a PEgRNA that is particularly useful for any given of these applications.

[0678] When designing a PEgRNA for any particular application or use of prime editing, a number of considerations may be taken into account, which include, but are not limited to:
[0679] (a) the target sequence, i.e., the nucleotide sequence in which one or more nucleobase modifications are desired to be installed by the prime editor;
[0680] (b) the location of the cut site within the target sequence, i.e., the specific nucleobase position at which the prime editor will induce a single-stand nick to create a 3′ end RT primer sequence on one side of the nick and the 5′ end endogenous flap on the other side of the nick (which ultimately is removed by FEN1 or equivalent thereto and replaced by the 3′ ssDNA flap. The cut site is analogous to the “edit location” since this what creates the 3′ end RT primer sequence which becomes extended by the RT during RNA-depending DNA polymerization to create the 3′ ssDNA flap containing the desired edit, which then replaces the 5′ endogenous DNA flap in the target sequence.
[0681] (c) the available PAM sequences (including the canonical SpCas9 PAM sites, as well as non-canonical PAM sites recognized by Cas9 variants and equivalents with expanded or differing PAM specificities);
[0682] (d) the spacing between the available PAM sequences and the location of the cut site in the target sequence;
[0683] (e) the particular Cas9, Cas9 variant, or Cas9 equivalent of the prime editor being used; (f) the sequence and length of the primer binding site;
[0684] (g) the sequence and length of the edit template;
[0685] (h) the sequence and length of the homology arm;
[0686] (i) the spacer sequence and length; and
[0687] (j) the core sequence.

[0688] The instant disclosure discusses these aspects above.

[0689] In one embodiment, an approach to designing a suitable PEgRNA, and optionally a nicking-sgRNA design guide for second-site nicking, is hereby provided. This embodiment provides a step-by-step set of instructions for designing PEgRNAs and nicking-sgRNAs for prime editing which takes into account one or more of the above considerations. The steps reference the examples shown in FIGS. 70A-70I.
[0690] 1. Define the target sequence and the edit. Retrieve the sequence of the target DNA region (˜200 bp) centered around the location of the desired edit (point mutation, insertion, deletion, or combination thereof). See FIG. 70A.
[0691] 2. Locate target PAMs. Identify PAMs in the proximity to the desired edit location. PAMs can be identified on either strand of DNA proximal to the desired edit location. While PAMs close to the edit position are preferred (i.e., wherein the nick site is less than 30 nt from the edit position, or less than 29 nt, 28 nt, 27 nt, 26 nt, 25 nt, 24 nt, 23 nt, 22 nt, 21 nt, 20 nt, 19 nt, 18 nt, 17 nt, 16 nt, 15 nt, 14 nt, 13 nt, 12 nt, 11 nt, 10 nt, 9 nt, 8 nt, 7 nt, 6 nt, 5 nt, 4 nt, 3 nt, or 2 nt from the edit position to the nick site), it is possible to install edits using protospacers and PAMs that place the nick ≥30 nt from the edit position. See FIG. 70B.
[0692] 3. Locate the nick sites. For each PAM being considered, identify the corresponding nick site and on which strand. For Sp Cas9 H840A nickase, cleavage occurs in the PAM-containing strand between the 3^{rd} and 4^{th} bases 5′ to the NGG PAM. All edited nucleotides must exist 3′ of the nick site, so appropriate PAMs must place the nick 5′ to the target edit on the PAM-containing strand. In the example shown below, there are two possible PAMs. For simplicity, the remaining steps will demonstrate the design of a PEgRNA using PAM 1 only. See FIG. 70C.
[0693] 4. Design the spacer sequence. The protospacer of Sp Cas9 corresponds to the 20 nucleotides 5′ to the NGG PAM on the PAM-containing strand. Efficient Pol III transcription initiation requires a G to be the first transcribed nucleotide. If the first nucleotide of the protospacer is a G, the spacer sequence for the PEgRNA is simply the protospacer sequence. If the first nucleotide of the protospacer is not a G, the spacer sequence of the PEgRNA is G followed by the protospacer sequence. See FIG. 70D.
[0694] 5. Design a primer binding site (PBS). Using the starting allele sequence, identify the DNA primer on the PAM-containing strand. The 3′ end of the DNA primer is the nucleotide just upstream of the nick site (i.e. the 4^{th} base 5′ to the NGG PAM for Sp Cas9). As a general design principle for use with PE2 and PE3, a PEgRNA primer binding site (PBS) containing 12 to 13 nucleotides of complementarity to the DNA primer can be used for sequences that contain ˜40-60% GC content. For sequences with low GC content, longer (14- to 15-nt) PBSs should be tested. For sequences with higher GC content, shorter (8- to 11-nt) PBSs should be tested. Optimal PBS sequences should be determined empirically, regardless of GC content. To design a length-p PBS sequence, take the reverse complement of the first p nucleotides 5′ of the nick site in the PAM-containing strand using the starting allele sequence. See FIG. 70E.
[0695] 6. Design an RT template (or DNA synthesis template). The RT template (or DNA synthesis template where the polymerase is not reverse transcriptase) encodes the designed edit and homology to the sequence adjacent to the edit. In one embodiment, these regions correspond to the DNA synthesis template of FIG. 3D and FIG. 3E, wherein the DNA synthesis template comprises the “edit template” and the “homology arm.” Optimal RT template lengths vary based on the target site. For short-range edits (positions +1 to +6), it is recommended to test a short (9 to 12 nt), a medium (13 to 16 nt), and a long (17 to 20 nt) RT template. For long-range edits (positions +7 and beyond), it is recommended to use RT templates that extend at least 5 nt (preferably 10 or more nt) past the position of the edit to allow for sufficient 3′ DNA flap homology. For long-range edits, several RT templates should be screened to identify functional designs. For larger insertions and deletions (≥5 nt), incorporation of greater 3′ homology (˜20 nt or more) into the RT template is recommended. Editing efficiency is typically impaired when the RT template encodes the synthesis of a G as the last nucleotide in the reverse transcribed DNA product (corresponding to a C in the RT template of the PEgRNA). As many RT templates support efficient prime editing, avoidance of G as the final synthesized nucleotide is recommended when designing RT templates. To design a length-r RT template sequence, use the desired allele sequence and take the reverse complement of the first r nucleotides 3′ of the nick site in the strand that originally contained the PAM. Note that compared to SNP edits, insertion or deletion edits using RT templates of the same length will not contain identical homology. See FIG. 70F.
[0696] 7. Assemble the full PEgRNA sequence. Concatenate the PEgRNA components in the following order (5′ to 3′): spacer, scaffold, RT template and PBS. See FIG. 70G.
[0697] 8. Designing nicking-sgRNAs for PE3. Identify PAMs on the non-edited strand upstream and downstream of the edit. Optimal nicking positions are highly locus-dependent and should be determined empirically. In general, nicks placed 40 to 90 nucleotides 5′ to the position across from the PEgRNA-induced nick lead to higher editing yields and fewer indels. A nicking sgRNA has a spacer sequence that matches the 20-nt protospacer in the starting allele, with the addition of a 5′-G if the protospacer does not begin with a G. See FIG. 70H.
[0698] 9. Designing PE3b nicking-sgRNAs. If a PAM exists in the complementary strand and its corresponding protospacer overlaps with the sequence targeted for editing, this edit could be a candidate for the PE3b system. In the PE3b system, the spacer sequence of the nicking-sgRNA matches the sequence of the desired edited allele, but not the starting allele. The PE3b system operates efficiently when the edited nucleotide(s) falls within the seed region (˜10 nt adjacent to the PAM) of the nicking-sgRNA protospacer. This prevents nicking of the complementary strand until after installation of the edited strand, preventing competition between the PEgRNA and the sgRNA for binding the target DNA. PE3b also avoids the generation of simultaneous nicks on both strands, thus reducing indel formation significantly while maintaining high editing efficiency. PE3b sgRNAs should have a spacer sequence that matches the 20-nt protospacer in the desired allele, with the addition of a 5′ G if needed. See FIG. 70I.

[0699] The above step-by-step process for designing a suitable PEgRNA and a second-site nicking sgRNA is not meant to be limiting in any way. The disclosure contemplates variations of the above-described step-by-step process which would be derivable therefrom by a person of ordinary skill in the art.

### [7] Applications Utilizing Prime Editing

[0700] In addition to the development of the prime editing system described herein as a new “search-and-replace” genome editing technology that mediates targeted insertions, deletions, and all 12 possible base-to-base conversions at targeted loci in human cells without requiring double-stranded DNA breaks, or donor DNA templates, the inventors have also contemplated the use of the prime editors in a wide-array of specific applications. For example, and as exemplied and discussed herein, prime editing can be used to (a) install mutation-correcting changes to a nucleotide sequence, (b) install protein and RNA tags, (c) intallation of immunoepitopes on proteins of interest, (d) install inducible dimerization domains in proteins, (e) install or remove sequences to alter that activity of a biomolecule, (f) install recombinase target sites to direct specific genetic changes, and (g) mutagenesis of a target sequence by using an error-prone RT. In addition to these methods which, in general, insert, change, or delete nucleotide sequences at target sites of interest, prime editors can also be used to construct highly programmable libraries, as well as to conduct cell data recording and lineage tracing studies. The inventors have also contemplated additional design features of PEgRNAs that are aimed to improve the efficacy of prime editing. Still further, the inventors have conceived of methods for successfully delivering prime editors using vector delivery systems and which involve splitting the napDNAbp using intein domains.

[0701] These specific exemplary uses of prime editing are in no way intended to be limiting. The present Application contemplates any use for prime editing which involves, in general, some form of the installation, removal, and/or modification of one or more nucleobases at a target site in a nucleotide sequence, e.g., a genomic DNA.

[0702] For any of the exemplified uses for prime editing, one may use any prime editor disclosed herein, including PE1, PE2, PE3, and PE3b, or PE-short.

[0703] A. Prime Editing Mechanism

[0704] In various embodiments, prime editing (or “prime editing”) operates by contacting a target DNA molecule (for which a change in the nucleotide sequence is desired to be introduced) with a nucleic acid programmable DNA binding protein (napDNAbp) complexed with an extended guide RNA. In reference to FIG. 1G, the extended guide RNA comprises an extension at the 3′ or 5′ end of the guide RNA, or at an intramolecular location in the guide RNA and encodes the desired nucleotide change (e.g., single nucleotide change, insertion, or deletion). In step (a), the napDNAbp/extended gRNA complex contacts the DNA molecule and the extended gRNA guides the napDNAbp to bind to a target locus. In step (b), a nick in one of the strands of DNA of the target locus is introduced (e.g., by a nuclease or chemical agent), thereby creating an available 3′ end in one of the strands of the target locus. In certain embodiments, the nick is created in the strand of DNA that corresponds to the R-loop strand, i.e., the strand that is not hybridized to the guide RNA sequence, i.e., the “non-target strand.” The nick, however, could be introduced in either of the strands. That is, the nick could be introduced into the R-loop “target strand” (i.e., the strand hybridized to the protospacer sequence of the extended gRNA) or the “non-target strand” (i.e, the strand forming the single-stranded portion of the R-loop and which is complementary to the target strand). In step (c), the 3′ end of the DNA strand (formed by the nick) interacts with the extended portion of the guide RNA in order to prime reverse transcription (i.e, “target-primed RT”). In certain embodiments, the 3′ end DNA strand hybridizes to a specific RT priming sequence on the extended portion of the guide RNA, i.e, the “reverse transcriptase priming sequence.” In step (d), a reverse transcriptase is introduced (as a fusion protein with the napDNAbp or in trans) which synthesizes a single strand of DNA from the 3′ end of the primed site towards the 5′ end of the extended guide RNA. This forms a single-strand DNA flap comprising the desired nucleotide change (e.g., the single base change, insertion, or deletion, or a combination thereof) and which is otherwise homologous to the endogenous DNA at or adjacent to the nick site. In step (e), the napDNAbp and guide RNA are released. Steps (f) and (g) relate to the resolution of the single strand DNA flap such that the desired nucleotide change becomes incorporated into the target locus. This process can be driven towards the desired product formation by removing the corresponding 5′ endogenous DNA flap (e.g., by FEN1 or similar enzyme that is provide in trans, as a fusion with the prime editor, or endogenously provided) that forms once the 3′ single strand DNA flap invades and hybridizes to the endogenous DNA sequence. Without being bound by theory, the cells endogenous DNA repair and replication processes resolves the mismatched DNA to incorporate the nucleotide change(s) to form the desired altered product. The process can also be driven towards product formation with “second strand nicking,” as exemplified in FIG. 1G, or “termporal second strand nicking,” as exemplified in FIG. 1I and discussed herein.

[0705] The process of prime editing may introduce at least one or more of the following genetic changes: transversions, transitions, deletions, and insertions. In addition, prime editing may be implemented for specific applications. For example, and as exemplied and discussed herein, prime editing can be used to (a) install mutation-correcting changes to a nucleotide sequence, (b) install protein and RNA tags, (c) intallation of immunoepitopes on proteins of interest, (d) install inducible dimerization domains in proteins, (e) install or remove sequences to alter that activity of a biomolecule, (f) install recombinase target sites to direct specific genetic changes, and (g) mutagenesis of a target sequence by using an error-prone RT. In addition to these methods which, in general, insert, change, or delete nucleotide sequences at target sites of interest, prime editors can also be used to construct highly programmable libraries, as well as to conduct cell data recording and lineage tracing studies. The inventors have also contemplated additional design features of PEgRNAs that are aimed to improve the efficacy of prime editing. Still further, the inventors have conceived of methods for successfully delivering prime editors using vector delivery systems and which involve splitting the napDNAbp using intein domains.

[0706] The term “prime editing system” or “prime editor (PE)” refers the compositions involved in the method of genome editing using target-primed reverse transcription (TPRT) describe herein, including, but not limited to the napDNAbps, reverse transcriptases, fusion proteins (e.g., comprising napDNAbps and reverse transcriptases), extended guide RNAs, and complexes comprising fusion proteins and extended guide RNAs, as well as accessory elements, such as second strand nicking components and 5′ endogenous DNA flap removal endonucleases (e.g., FEN1) for helping to drive the prime editing process towards the edited product formation.

[0707] In another embodiment, the schematic of FIG. 3F depicts the interaction of a typical PEgRNA with a target site of a double stranded DNA and the concomitant production of a 3′ single stranded DNA flap containing the genetic change of interest. The double strand DNA is shown with the top strand in the 3′ to 5′ orientation and the lower strand in the 5′ to 3′ direction. The top strand comprises the “protospacer” and the PAM sequence and is referred to as the “target strand.” The complementary lower strand is referred to as the “non-target strand.” Although not shown, the PEgRNA depicted would be complexed with a Cas9 or equivalent. As shown in the schematic, the spacer of the PEgRNA anneals to a complementary region on the target strand, which is referred to as the protospacer, which is located just downstream of the PAM sequence is approximately 20 nucleotides in length. This interaction forms as DNA/RNA hybrid between the spacer RNA and the protospacer DNA, and induces the formation of an R loop in the region opposite the protospacer. As taught elsewhere herein, the Cas9 protein (not shown) then induces a nick in the non-target strand, as shown. This then leads to the formation of the 3′ ssDNA flap region which, in accordance with *z*, interacts with the 3′ end of the PEgRNA at the primer binding site. The 3′ end of the ssDNA flap (i.e., the reverse transcriptase primer sequence) anneals to the primer binding site (A) on the PEgRNA, thereby priming reverse transcriptase. Next, reverse transcriptase (e.g., provided in trans or provided cis as a fusion protein, attached to the Cas9 construct) then polymerizes a single strand of DNA which is coded for by the edit template (B) and homology arm (C). The polymerization continues towards the 5′ end of the extension arm. The polymerized strand of ssDNA forms a ssDNA 3′ end flap which, as describe elsewhere (e.g., as shown in FIG. 1G), invades the endogenous DNA, displacing the corresponding endogenous strand (which is removed as a 5′ DNA flap of endogenous DNA), and installing the desired nucleotide edit (single nucleotide base pair change, deletions, insertions (including whole genes) through naturally occurring DNA repair/replication rounds.

[0708] This application of prime editing can be further described in Example 1.

[0709] B. Mutagenesis Using Prime Editing with Error-Prone RT

[0710] In various embodiments, the prime editing system (i.e., prime editing system) may include the use of an error-prone reverse transcriptase for performing targeted mutagenesis, i.e., to mutate only a well-defined stretch of DNA in a genome or other DNA element in a cell. FIG. 22 provides a schematic of an exemplary process for introducing conducting targeted mutagenesis with an error-prone reverse transcriptase on a target locus using a nucleic acid programmable DNA binding protein (napDNAbp) complexed with an extended guide RNA. This process may be referred to as an embodiment of prime editing for targeted mutagenesis. The extended guide RNA comprises an extension at the 3′ or 5′ end of the guide RNA, or at an intramolecular location in the guide RNA. In step (a), the napDNAbp/gRNA complex contacts the DNA molecule and the gRNA guides the napDNAbp to bind to the target locus to be mutagenized. In step (b), a nick in one of the strands of DNA of the target locus is introduced (e.g., by a nuclease or chemical agent), thereby creating an available 3′ end in one of the strands of the target locus. In certain embodiments, the nick is created in the strand of DNA that corresponds to the R-loop strand, i.e., the strand that is not hybridized to the guide RNA sequence. In step (c), the 3′ end DNA strand interacts with the extended portion of the guide RNA in order to prime reverse transcription. In certain embodiments, the 3′ ended DNA strand hybridizes to a specific RT priming sequence on the extended portion of the guide RNA. In step (d), an error-prone reverse transcriptase is introduced which synthesizes a mutagenized single strand of DNA from the 3′ end of the primed site towards the 3′ end of the guide RNA. Exemplary mutations are indicated with an asterisk “*”. This forms a single-strand DNA flap comprising the desired mutagenized region. In step (e), the napDNAbp and guide RNA are released. Steps (f) and (g) relate to the resolution of the single strand DNA flap (comprising the mutagenized region) such that the desired mutagenized region becomes incorporated into the target locus. This process can be driven towards the desired product formation by removing the corresponding 5′ endogenous DNA flap that forms once the 3′ single strand DNA flap invades and hybridizes to the complementary sequence on the other strand. The process can also be driven towards product formation with second strand nicking, as exemplified in FIG. 1F. Following endogenous DNA repair and/or replication processes, the mutagenized region becomes incorporated into both strands of DNA of the DNA locus.

[0711] This application of prime editing can be further described in Example 2.

[0712] Error-prone or mutagenic RT enzymes are known in the art. As used herein, the term “error-prone” reverse transcriptase refers to a reverse transcriptase enzyme that occurs naturally or which has been derived from another reverse transcriptase (e.g., a wild type M-MLV reverse transcriptase) which has an error rate that is less than the error rate of wild type M-MLV reverse transcriptase. The error rate of wild type M-MLV reverse transcriptase is reported to be in the range of one error in 15,000 to 27,000 nucleobase incorporations. See Boutabout et al. (2001) “DNA synthesis fidelity by the reverse transcriptase of the yeast retrotransposon Ty1,” Nucleic Acids Res 29(11):2217-2222, which is incorporated herein by reference. Thus, for purposes of this application, the term “error prone” refers to those RT that have an error rate that is greater than one error in 15,000 nucleobase incorporation (6.7×10⁻⁵ or higher), e.g., 1 error in 14,000 nucleobases (7.14×10⁻⁵ or higher), 1 error in 13,000 nucleobases or fewer (7.7×10⁻⁵ or higher), 1 error in 12,000 nucleobases or fewer (7.7×10⁻⁵ or higher), 1 error in 11,000 nucleobases or fewer (9.1×10⁻⁵ or higher), 1 error in 10,000 nucleobases or fewer (1×10⁻⁴ or 0.0001 or higher), 1 error in 9,000 nucleobases or fewer (0.00011 or higher), 1 error in 8,000 nucleobases or fewer (0.00013 or higher) 1 error in 7,000 nucleobases or fewer (0.00014 or higher), 1 error in 6,000 nucleobases or fewer (0.00016 or higher), 1 error in 5,000 nucleobases or fewer (0.0002 or higher), 1 error in 4,000 nucleobases or fewer (0.00025 or higher), 1 error in 3,000 nucleobases or fewer (0.00033 or higher), 1 error in 2,000 nucleobase or fewer (0.00050 or higher), or 1 error in 1,000 nucleobases or fewer (0.001 or higher), or 1 error in 500 nucleobases or fewer (0.002 or higher), or 1 error in 250 nucleobases or fewer (0.004 or higher).

[0713] A variety of mutagenic RTs could be envisioned for generation of mutagenized sequences using prime editing. Two such examples are the mutagenic reverse transcriptases from Bordetella phage (see Handa, S., et al. Nucl Acids Res 9711-25 (2018), which is incorporated herein by reference) and Legionella pneumophila (see Arambula, D., et al. Proc Natl Acad Sci USA 8212-7 (2013), which is incorporated by reference). In the case of the RT from Bordetella phage (brt), an accessory protein might need to also be added (bavd) to Cas9—or delivered in trans—as well as additional RNA sequences to the PEgRNA to improve binding of the mutagenic RT to the target site (see Handa, S., et al. Nucl Acids Res 9711-25 (2018)). When using mutagenic RTs, the template region of the PEgRNA might be enriched in adenosines or AAY codons to enhance diversity.

[0714] The amino acid sequence of the mutagenic RT from Bordetella phage is provided as follows. Like other RTs disclosed herein, the Brt protein may be fused to a napDNAbp as a fusion protein to form a functional PE.

| Name | Sequence |
|---|---|
| brt | MGKRHRNLIDQITTWENLLDAYRKTSHGKRRTWGYLEFKEYDL |
| muta- | ANLLALQAELKAGNYERGPYREFLVYEPKPRLISALEFKDRLV |
| genic | QHALCNIVAPIFEAGLLPYTYACRPDKGTHAGVCHVQAELRRT |
| rt | RATHFLKSDFSKFFPSIDRAALYAMIDKKIHCAATRRLLRVVL |
| | PDEGVGIPIGSLTSQLFANVYGGAVDRLLHDELKQRHWARYMD |
| | DIVVLGDDPEELRAVFYRLRDFASERLGLKISHWQVAPVSRGI |
| | NFLGYRIWPTHKLLRKSSVKRAKRKVANFIKHGEDESLQRFLA |
| | SWSGHAQWADTHNLFTWMEEQYGIACH (SEQ ID NO: 235) |

[0715] In the case of Brt from Bodetella, the PE fusion may also include an additional accessory protein (Bavd). The accessory protein may be fused to the PE fusion protein or provided in trans. The amino acid sequence of Bavd accessory protein is provided as follows:

| Name | Sequence |
|---|---|
| bavd | MEPIEEATKCYDQMLIVERYERVISYLYPIAQSIPRKHGV |
| accessory | AREMFLKCLLGQVELFIVAGKSNQVSKLYAADAGLAMLRF |
| protein | WLRFLAGIQKPHAMTPHQVETAQVLIAEVGRILGSWIAR |
| to brt | VNRKGQAGK (SEQ ID NO: 236) |

[0716] In the case of Brt from Bodetella, the PEgRNA may comprise an additional nucleotide sequence added a PEgRNA, e.g., to the 5′ or 3′ end. Examplary sequence is as follows, which is originally from the Bordetella phage genome:

| NAME | SEQUENCE |
|---|---|
| PEGRNA- | ACCUUCUUGCAUGGCUCUGCCAACGCUACGGCUUGGCGGGC |
| ADDITION | UGGCCUUUCCUCAAUAGGUGGUCAGCCGGUUCUGUCCUGCU |
| 1 | UCGGCGAACACGUUACACGGUUCGGCAAAACGUCGAUUACU |
| | GAAAAUGGAAAGGCGGGGCCGACUUCAAGGGCAGGCUGGGA |
| | AAUAA (SEQ ID NO: 237) |

[0717] This PEgRNA addition sequence can be reduced in various ways to shorten the length. For example, the PEgRNA-addition 1 sequence could be reduced to the following exemplary alternative addition sequences:

| NAME | SEQUENCE |
|---|---|
| PEGRNA- | ACCUUCUUGCAUGGCUCUGCCAACGCUACGGCUUGGCGG |
| ADDITION | GCUGGCCUUUCCUCAAUAGGUGGUCAGCCGGUUCUGUCC |
| 2 | UGCUUCGGCGAACACGUUACACGGUUCGGCAAAACGUCG |
| | AUUACUGAAAAUGGAAAGGCGGGGCCGACUUC |
| | (SEQ ID NO: 238) |
| PEGRNA- | ACCUUCUUGCAUGGCUCUGCCAACGCUACGGCUUGGCGG |
| ADDITION | GCUGGCCUUUCCUCAAUAGGUGGUCAAAGGGCAGGCUGG |
| 3 | GAAAUAA (SEQ ID NO: 239) |
| PEGRNA- | ACCUUCUUGCAUGGCUCUGCCAACGCUACGGCUUGGCGG |
| ADDITION | GCUGGCCUUUCCUCAAUAGGUGGUCA |
| 4 | (SEQ ID NO: 277) |
| PEGRNA- | CAUGGCUCUGCCAACGCUACGGCUUGGCGGGCUGGCCUU |
| ADDITION | UCCUCAAUAGGUGGUCAGCCGGUUCUGUCCUGCUUCGGC |
| 5 | GAACACGUUACACGGUUCGGCAAAACGUCGAUUACUGAA |
| | AAUGGAAAGGCGGGGCCGACUUCAAGGGCAGGCUGGGAA |
| | AUAA (SEQ ID NO: 240) |
| PEGRNA- | CAUGGCUCUGCCAACGCUACGGCUUGGCGGGCUGGCCUU |
| ADDITION | UCCUCAAUAGGUGGUCAGCCGGUUCUGUCCUGCUUCGGC |
| 6 | GAACACGUUACACGGUUCGGCAAAACGUCGAUUACUGAA |
| | AAUGGAAAGGCGGGGCCGACUUC |
| | (SEQ ID NO: 241) |
| PEGRNA- | CAUGGCUCUGCCAACGCUACGGCUUGGCGGGCUGGCCUU |
| ADDITION | UCCUCAAUAGGUGGUCAAAGGGCAGGCUGGGAAAUAA |
| 7 | (SEQ ID NO: 242) |
| PEGRNA- | CAUGGCUCUGCCAACGCUACGGCUUGGCGGGCUGGCCUU |
| ADDITION | UCCUCAAUAGGUGGUCA |
| 8 | (SEQ ID NO: 243) |

[0718] In other embodiments, the PEgRNA addition sequence can be also be mutated. For example, the PEgRNA-addition 1 sequence could be mutated to the following exemplary alternative addition sequence:

| NAME | SEQUENCE |
|---|---|
| PEGRNA- | ACCUUCUUGCAUGGCUCUGCCAACGCUACGGCUUGGCGG |
| ADDITION | GCUGGCCUUUCCUCAAUAGAUGAGCCGCCGGUUCUGUCC |
| 1 | UGCUUCGGCGAACACGUUACACGGUUCGGCAAAACGUCG |
| MUTATED | AUUACUGAAAAUGGAAAGGCGGGGCCGACUUCAAGGGCA |
| | GGCUGGGAAAUAA (SEQ ID NO: 244) |

[0719] In various embodiments relating to the use of PE for introducing mutations, special PEgRNA considerations may apply. For example, without wishing to be bound by theory, the additional PEgRNA sequences described above might be needed to enable efficient mutagenesis via mutagenic RTs.

[0720] Any mutagenic RT may be used with the prime editors disclosed herein. For example, the error-prone RT described in the following references may be used and are incorporated herein by reference:

[0721] Bebenek et al., “Error-prone polymerization by HIV-1 reverse transcriptase. Contribution of template-primer misalignment, miscoding, and termination probability to mutational hot spots.,” J. Biol Chem, 1993, 268: 10324-34; and

[0722] Menendez-Arias, “Mutation rates and instrinsic fidelity of retroviral reverse transcriptases,” 2009, Viruses, 1(3): 1137-1165.

[0723] Various error-prone RTs can include, but are not limited to, the following enzymes disclosed in Table 1 of Menendez-Arias et al. (the entire contents of the reference of which are incorporated by reference), as follows:

| | REPORTED ERROR- |
|---|---|
| ERROR-PRONE RT | RATE RANGE |
| HIV-1 RT | 0.6 × 10−4 TO 2.0 × 10−4 |
| (GROUP M, SUBTYPE B) | |
| HIV-1 RT (GROUP O) | 5.5 × 10−5 |
| SIV AGM RT | 2.9 × 10−5 |
| SIV MNE RT | 1.6 × 10−5 TO 1.2 × 10−4 |
| PFV RT | 1.7 × 10−4 |
| FIV RT | 6.2 × 10−5 |
| AMV RT | 5.9 × 10−5 |
| MO-MLV RT | 2.7 × 10−5 TO 3.3 × 10−5 |

[0724] C. Use of Prime Editing for Treating Triplet Expansion Disorders

[0725] The prime editing system or prime editing (PE) system described herein may be used to contract trinucleotide repeat mutations (or “triplet expansion diseases”) to treating conditions such as Huntington's disease and other trinucleotide repeat disorders. Trinucleotide repeat expansion disorders are complex, progressive disorders that involve developmental neurobiology and often affect cognition as well as sensori-motor functions. The disorders show genetic anticipation (i.e. increased severity with each generation). The DNA expansions or contractions usually happen meiotically (i.e. during the time of gametogenesis, or early in embryonic development), and often have sex-bias meaning that some genes expand only when inherited through the female, others only through the male. In humans, trinucleotide repeat expansion disorders can cause gene silencing at either the transcriptional or translational level, which essentially knocks out gene function. Alternatively, trinucleotide repeat expansion disorders can cause altered proteins generated with large repetitive amino acid sequences that either abrogate or change protein function, often in a dominant-negative manner (e.g. poly-glutamine diseases).

[0726] Without wishing to be bound by theory, triplet expansion is caused by slippage during DNA replication or during DNA repair synthesis. Because the tandem repeats have identical sequence to one another, base pairing between two DNA strands can take place at multiple points along the sequence. This may lead to the formation of “loop out” structures during DNA replication or DNA repair synthesis. This may lead to repeated copying of the repeated sequence, expanding the number of repeats. Additional mechanisms involving hybrid RNA:DNA intermediates have been proposed. Prime editing may be used to reduce or eliminate these triplet expansion regions by deletion one or more or the offending repeat codon triplets. In an embodiment of this use, FIG. 23, provides a schematic of a PEgRNA design for contracting or reducing trinucleotide repeat sequences with prime editing.

[0727] Prime editing may be implemented to contract triplet expansion regions by nicking a region upstream of the triplet repeat region with the prime editor comprising a PEgRNA appropriated targeted to the cut site. The prime editor then synthesizes a new DNA strand (ssDNA flap) based on the PEgRNA as a template (i.e., the edit template thereof) that codes for a healthy number of triplet repeats (which depends on the particular gene and disease). The newly synthesized ssDNA strand comprising the healthy triplet repeat sequence also is synthesized to include a short stretch of homology (i.e., the homology arm) that matches the sequence adjacent to the other end of the repeat. Invasion of the newly synthesized strand, and subsequent replacement of the endogenous DNA with the newly synthesized ssDNA flap, leads to a contracted repeat allele.

[0728] Depending on the particular trinucleotide expansion disorder, the defect-inducing triplet expansions may occur in “trinucleotide repeat expansion proteins.” Trinucleotide repeat expansion proteins are a diverse set of proteins associated with susceptibility for developing a trinucleotide repeat expansion disorder, the presence of a trinucleotide repeat expansion disorder, the severity of a trinucleotide repeat expansion disorder or any combination thereof. Trinucleotide repeat expansion disorders are divided into two categories determined by the type of repeat. The most common repeat is the triplet CAG, which, when present in the coding region of a gene, codes for the amino acid glutamine (Q). Therefore, these disorders are referred to as the polyglutamine (polyQ) disorders and comprise the following diseases: Huntington Disease (HD); Spinobulbar Muscular Atrophy (SBMA); Spinocerebellar Ataxias (SCA types 1, 2, 3, 6, 7, and 17); and Dentatorubro-Pallidoluysian Atrophy (DRPLA). The remaining trinucleotide repeat expansion disorders either do not involve the CAG triplet or the CAG triplet is not in the coding region of the gene and are, therefore, referred to as the non-polyglutamine disorders. The non-polyglutamine disorders comprise Fragile X Syndrome (FRAXA); Fragile XE Mental Retardation (FRAXE); Friedreich Ataxia (FRDA); Myotonic Dystrophy (DM); and Spinocerebellar Ataxias (SCA types 8, and 12).

[0729] The proteins associated with trinucleotide repeat expansion disorders can be selected based on an experimental association of the protein associated with a trinucleotide repeat expansion disorder to a trinucleotide repeat expansion disorder. For example, the production rate or circulating concentration of a protein associated with a trinucleotide repeat expansion disorder may be elevated or depressed in a population having a trinucleotide repeat expansion disorder relative to a population lacking the trinucleotide repeat expansion disorder. Differences in protein levels may be assessed using proteomic techniques including but not limited to Western blot, immunohistochemical staining, enzyme linked immunosorbent assay (ELISA), and mass spectrometry. Alternatively, the proteins associated with trinucleotide repeat expansion disorders may be identified by obtaining gene expression profiles of the genes encoding the proteins using genomic techniques including but not limited to DNA microarray analysis, serial analysis of gene expression (SAGE), and quantitative real-time polymerase chain reaction (Q-PCR).

[0730] Non-limiting examples of proteins associated with trinucleotide repeat expansion disorders which can be corrected by prime editing include AR (androgen receptor), FMR1 (fragile X mental retardation 1), HTT (huntingtin), DMPK (dystrophia myotonica-protein kinase), FXN (frataxin), ATXN2 (ataxin 2), ATN1 (atrophin 1), FEN1 (flap structure-specific endonuclease 1), TNRC6A (trinucleotide repeat containing 6A), PABPN1 (poly(A) binding protein, nuclear 1), JPH3 (junctophilin 3), MED15 (mediator complex subunit 15), ATXN1 (ataxin 1), ATXN3 (ataxin 3), TBP (TATA box binding protein), CACNA1A (calcium channel, voltage-dependent, P/Q type, alpha 1A subunit), ATXN8OS (ATXN8 opposite strand (non-protein coding)), PPP2R2B (protein phosphatase 2, regulatory subunit B, beta), ATXN7 (ataxin 7), TNRC6B (trinucleotide repeat containing 6B), TNRC6C (trinucleotide repeat containing 6C), CELF3 (CUGBP, Elav-like family member 3), MAB21L1 (mab-21-like 1 (C. elegans)), MSH2 (mutS homolog 2, colon cancer, nonpolyposis type 1 (E. coli)), TMEM185A (transmembrane protein 185A), SIX5 (SIX homeobox 5), CNPY3 (canopy 3 homolog (zebrafish)), FRAXE (fragile site, folic acid type, rare, fra(X)(q28) E), GNB2 (guanine nucleotide binding protein (G protein), beta polypeptide 2), RPL14 (ribosomal protein L14), ATXN8 (ataxin 8), INSR (insulin receptor), TTR (transthyretin), EP400 (E1A binding protein p400), GIGYF2 (GRB10 interacting GYF protein 2), OGG1 (8-oxoguanine DNA glycosylase), STC1 (stanniocalcin 1), CNDP1 (carnosine dipeptidase 1 (metallopeptidase M20 family)), C10 or f2 (chromosome 10 open reading frame 2), MAML3 mastermind-like 3 (Drosophila), DKC1 (dyskeratosis congenita 1, dyskerin), PAXIP1 (PAX interacting (with transcription-activation domain) protein 1), CASK (calcium/calmodulin-dependent serine protein kinase (MAGUK family)), MAPT (microtubule-associated protein tau), SP1 (Sp1 transcription factor), POLG (polymerase (DNA directed), gamma), AFF2 (AF4/FMR2 family, member 2), THBS1 (thrombospondin 1), TP53 (tumor protein p53), ESR1 (estrogen receptor 1), CGGBP1 (CGG triplet repeat binding protein 1), ABT1 (activator of basal transcription 1), KLK3 (kallikrein-related peptidase 3), PRNP (prion protein), JUN (jun oncogene), KCNN3 (potassium intermediate/small conductance calcium-activated channel, subfamily N, member 3), BAX (BCL2-associated X protein), FRAXA (fragile site, folic acid type, rare, fra(X)(q27.3) A (macroorchidism, mental retardation)), KBTBD10 (kelch repeat and BTB (POZ) domain containing 10), MBNL1 (muscleblind-like (Drosophila)), RAD51 (RAD51 homolog (RecA homolog, E. coli) (S. cerevisiae)), NCOA3 (nuclear receptor coactivator 3), ERDA1 (expanded repeat domain, CAG/CTG 1), TSC1 (tuberous sclerosis 1), COMP (cartilage oligomeric matrix protein), GCLC (glutamate-cysteine ligase, catalytic subunit), RRAD (Ras-related associated with diabetes), MSH3 (mutS homolog 3 (E. coli)), DRD2 (dopamine receptor D2), CD44 (CD44 molecule (Indian blood group)), CTCF (CCCTC-binding factor (zinc finger protein)), CCND1 (cyclin D1), CLSPN (claspin homolog (Xenopus laevis)), MEF2A (myocyte enhancer factor 2A), PTPRU (protein tyrosine phosphatase, receptor type, U), GAPDH (glyceraldehyde-3-phosphate dehydrogenase), TRIM22 (tripartite motif-containing 22), WT1 (Wilms tumor 1), AHR (aryl hydrocarbon receptor), GPX1 (glutathione peroxidase 1), TPMT (thiopurine S-methyltransferase), NDP (Norrie disease (pseudoglioma)), ARX (aristaless related homeobox), MUS81 (MUS81 endonuclease homolog (S. cerevisiae)), TYR (tyrosinase (oculocutaneous albinism IA)), EGR1 (early growth response 1), UNG (uracil-DNA glycosylase), NUMBL (numb homolog (Drosophila)-like), FABP2 (fatty acid binding protein 2, intestinal), EN2 (engrailed homeobox 2), CRYGC (crystallin, gamma C), SRP14 (signal recognition particle 14 kDa (homologous Alu RNA binding protein)), CRYGB (crystallin, gamma B), PDCD1 (programmed cell death 1), HOXA1 (homeobox A1), ATXN2L (ataxin 2-like), PMS2 a(PMS2 postmeiotic segregation increased 2 (S. cerevisiae)), GLA (galactosidase, alpha), CBL (Cas-Br-M (murine) ecotropic retroviral transforming sequence), FTH1 (ferritin, heavy polypeptide 1), IL12RB2 (interleukin 12 receptor, beta 2), OTX2 (orthodenticle homeobox 2), HOXA5 (homeobox A5), POLG2 (polymerase (DNA directed), gamma 2, accessory subunit), DLX2 (distal-less homeobox 2), SIRPA (signal-regulatory protein alpha), OTX1 (orthodenticle homeobox 1), AHRR (aryl-hydrocarbon receptor repressor), MANF (mesencephalic astrocyte-derived neurotrophic factor), TMEM158 (transmembrane protein 158 (gene/pseudogene)), and ENSG00000078687.

[0731] The prime editors herein disclosed may be used to contract triplet repeat expansion regions in any of the above-indicated disease proteins, including following polyglutamine triplet expansion disease genes (which show the particular location of the pathogenic repeats that may be removed wholly or in part by prime editing):

| | | POSITION OF |
|---|---|---|
| | | PATHOGENIC |
| TRIPLET EXPANSION DISEASE | AFFECTED GENE | REPEATS |
| DENTATORUBROPALLIDOLUYSIAN | ATN1 | 49-88 |
| ATROPHY | ATROPHIN-1 | |
| HUNTINGTON’S DISEASE | HTT | 36-250 |
| | THE HUNTINGTIN | |
| | GENE | |
| SPINALAND BULBAR MUSCULAR | AR | 38-62 |
| ATROPHY | ANDROGEN | |
| | RECEPTOR | |
| SPINOCEREBELLAR ATAXIA TYPE 1 | ATXN1 | 49-88 |
| | ATAXIN 1 | |
| SPINOCEREBELLAR ATAXIA TYPE 2 | ATXN2 | 33-77 |
| | ATAXIN 2 | |
| SPINOCEREBELLAR ATAXIA TYPE 3 | ATXN3 | 55-86 |
| | ATAXIN 3 | |
| SPINOCEREBELLAR ATAXIA TYPE 6 | CACNA1A | 21-30 |
| SPINOCEREBELLAR ATAXIA TYPE 7 | ATXN7 | 38-120 |
| | ATAXIN 7 | |
| SPINOCEREBELLAR ATAXIA TYPE 17 | TBP | 47-63 |
| | TATA-BINDING | |
| | PROTEIN | |

[0732] The prime editors herein disclosed may also be used to contract triplet repeat expansion regions typically found in the following non-polyglutamine triplet expansion disease genes:

| | | POSITION OF |
|---|---|---|
| TRIPLET EXPANSION | | PATHOGENIC |
| DISEASE | AFFECTED GENE | REPEATS |
| FRAXA (FRAGILE X | FMR1 | 230+ |
| SYNDROME) | FRAGILE X MENTAL | |
| | RETARDATION PROTEIN | |
| FXTAS (FRAGILE X- | FMR1 | 55-200 |
| ASSOCIATED | | |
| TREMOR/ATAXIA | | |
| SYNDROME) | | |
| FRAXE (FRAGILE XE MENTAL | AFF2 | 200+ |
| RETARDATION) | | |
| FRDA (FRIEDREICH'S ATAXIA) | FXN | 100+ |
| | FRATAXIN | |
| DM1 (MYOTONIC | DMPK | 50+ |
| DYSTROPHY TYPE 1) | MYOTONIN-PROTEIN | |
| | KINASE | |
| SCA8 (SPINOCEREBELLAR | SCA8 | 110-250 |
| ATAXIA TYPE 8) | ATAXIN 8 | |
| SCA12 (SPINOCEREBELLAR | PPP2R2B | 66-78 |
| ATAXIA TYPE 12) | SERINE/THREONIN | |
| | PROTEIN PHOSPHATASE | |
| | 2A | |

[0733] Prime editing may be implemented to contract triplet expansion regions using a PEgRNA with an edit template that is designed to delete at least one codon of a triplet expansion region. In other embodiments, the PEgRNAs for using in prime editing for this used to delete at least 1, or 2, or 3, or 4, or 5, or 6, or 7, or 8, or 9, or 10, or 11, or 12, or 13, or 14, or 15, or 16, or 17, or 18, or 19, or 20, or 21, or 22, or 23, or 24, or 25, or 26, or 27, or 28, or 29, or 30, or 31, or 32, or 33, or 34, or 35, or 36, or 37, or 38, or 39, or 40, or 41, or 42, or 43, or 44, or 45, or 46, or 47, or 48, or 49, or 50, or 51, or 52, or 53, or 54, or 55, or 56, or 57, or 58, or 59, or 60, or 61, or 62, or 63, or 64, or 65, or 66, or 67, or 68, or 69, or 70, or 71, or 72, or 73, or 74, or 75, or 76, or 77, or 78, or 79, or 80, or 81, or 82, or 83, or 84, or 85, or 86, or 87, or 88, or 89, or 90, or 91, or 92, or 93, or 94, or 95, or 96, or 97, or 98, or 99, or 100, or more codons from a triplet expansion region in order to arrive at a healthy (i.e., not associated with producing the disease) number of triplet repeats.

[0734] In other embodiments, the PEgRNAs for using in prime editing for this used to delete at least 1, or 2, or 3, or 4, or 5, or 6, or 7, or 8, or 9, or 10, or 11, or 12, or 13, or 14, or 15, or 16, or 17, or 18, or 19, or 20 or more codons from a triplet expansion region in order to arrive at a healthy (i.e., not associated with producing the disease) number of triplet repeats.

[0735] In other embodiments, the the PEgRNAs for using in prime editing for this used to delete at least 1, or 2, or 3, or 4, or 5, or 6, or 7, or 8, or 9, or 10, or 11, or 12, or 13, or 14, or 15, or more codons from a triplet expansion region in order to arrive at a healthy (i.e., not associated with producing the disease) number of triplet repeats.

[0736] In other embodiments, the PEgRNAs for using in prime editing for this used to delete at least 1, or 2, or 3, or 4, or 5, or 6, or 7, or 8, or 9, or 10, or more codons from a triplet expansion region in order to arrive at a healthy (i.e., not associated with producing the disease) number of triplet repeats.

[0737] Prime editing may be configured to correct any triplet expansion region, such as those described in Budworth et al., “A Brief History of Triplet Repeat Diseases,” Methods Mol Biol, 2013, 1010: 3-17, US 20011/00165540 A1 (Genome editing of genes associated with trinucleotide repeat expansion disorders in animals), US 2016/0355796 A1 (Compositions and methods of use of crispr-cas systems in nucleotide repeat disorders

[0738] In various embodiments, the disclosure provides a prime editing construct suitable for use in a cell having a trinucleotide repeat expansion region in a defective gene comprising (a) a prime editor fusion comprising a napDNAbp and a reverse transcriptase, (b) a PEgRNA comprising a spacer sequence that targets the trinucleotide repeat expansion region and an extension arm comprising an edit template that codes for the removal of the trinucleotide repeat expansion region.

[0739] In various other embodiments, the disclosure provides a method for deleting all or a portion of a trinucleotide repeat expansion region in a defective gene in a cell using prime editing comprising contacting the cell with a prime editor fusion comprising a napDNAbp and a reverse transcriptase and a PEgRNA comprising a spacer sequence that targets the trinucleotide repeat expansion region and an extension arm comprising an edit template that codes for the removal of the trinucleotide repeat expansion region.

[0740] In various embodiments, the trinucleotide repeat comprises repeating CTG, CAG, CGG, CCG, GAA, or TTC trinucleotides.

[0741] In various other embodiments, the tetranucleotide repeats, pentanucleotide repeats, or hexanucleotide repeats.

### D. Use of Prime Editing for Peptide Tagging

[0742] In another aspect, the disclosure provides a method of using the herein described prime editors for genetically grafting one or more peptide tags onto a protein using prime editing, More in particular, the disclosure provides a method for genetically installing one or more peptide tags onto a protein comprising: contacting a target nucleotide sequence encoding the protein with a prime editor configured to insert therein a second nucleotide sequence encoding the one or more peptide tags to result in a recombinant nucleotide sequence that encodes a fusion protein comprising the protein fused to the protein tag.

[0743] In other embodiments, the disclosure provides a method for making a fusion protein comprising a peptide of interest and one or more peptide tags, the method comprising: contacting a target nucleotide sequence encoding the protein with a prime editor configured to insert therein a second nucleotide sequence encoding the one or more peptide tags to result in a recombinant nucleotide sequence that encodes the fusion protein comprising the protein fused to the protein tag.

[0744] In various embodiments, the target nucleotide sequence is a specific gene of interest in a genomic DNA. The gene of interest may encode a protein of interest (e.g., a receptor, an enzyme, a therapeutic protein, a membrane protein, a transport protein, a signal transduction protein, or an immunological protein, etc.). The gene of interest may also encode an RNA molecule, including, but not limited to, messenger RNA (mRNA), transfer RNA (tRNA), ribosomal RNA (rRNA), small nuclear RNA (snRNA), antisense RNA, guide RNA, microRNA (miRNA), small interfering RNA (siRNA), and cell-free RNA (cfRNA).

[0745] The peptide tag may be any peptide tag or variant thereof which imparts one or more functions onto a protein for purposes such as separation, purification, visualization, solubilization, or detection. The peptides tags can include “affinity tags” (to facilitate protein purification), “solubilization tags” (to assist in proper folding of proteins), “chromatography tags” (to alter chromatographic properties of proteins), “epitope tags” (to bind to high affinity antibodies), and “fluorescence tags” (to facilitate visualization of proteins in a cell or in vitro). Examples of peptide tags include, but are not limited to the following tags:

| NAME | AMINO ACID SEQUENCE | SEQ ID NO: |
|---|---|---|
| AVITAG™ | GLNDIFEAQKIEWHE | SEQ ID NO: 245 |
| C-TAG | EPEA | SEQ ID NO: 246 |
| CALMODULIN- | KRRWKKNFIAVSAANRFKKI | SEQ ID NO: 247 |
| TAG | SSSGAL | |
| POLY- | EEEEEE | SEQ ID NO: 248 |
| GLUTAMATE | | |
| TAG | | |
| E-TAG | GAPVPYPDPLEPR | SEQ ID NO: 249 |
| FLAG-TAG | DYKDDDDK | SEQ ID NO: 2 |
| HA-TAG | YPYDVPDYA | SEQ ID NO: 5 |
| HIS-TAG | H (HIS₁) | SEQ ID NO: 252 |
| | HH (HIS₂) | SEQ ID NO: 253 |
| | HHH (HIS₃) | SEQ ID NO: 254 |
| | HHHH (HIS₄) | SEQ ID NO: 255 |
| | HHHHH (HIS₅) | SEQ ID NO: 256 |
| | HHHHHH (HIS₆) | SEQ ID NO: 257 |
| | HHHHHHH (HIS₇) | SEQ ID NO: 258 |
| | HHHHHHHH (HIS₈) | SEQ ID NO: 259 |
| | HHHHHHHHH (HIS₉) | SEQ ID NO: 260 |
| | HHHHHHHHHH (HIS₁₀) | SEQ ID NO: 261 |
| | HHHHHHHHHH...H... | SEQ ID NO: 262 |
| | (HIS_{N}, WHEREIN | |
| | N = 1-25) | |
| MYC-TAG | EQKLISEEDL | SEQ ID NO: 6 |
| NE-TAG | TKENPRSNQEESYDDNES | SEQ ID NO: 264 |
| RHO1D4-TAG | TETSQVAPA | SEQ ID NO: 265 |
| S-TAG | KETAAAKFERQHMDS | SEQ ID NO: 266 |
| SBP-TAG | MDEKTTGWRGGHVVEGLAGEL | SEQ ID NO: 267 |
| | EQLRARLEHHPQGQREP | |
| SOFTAG-1 | SLAELLNAGLGGS | SEQ ID NO: 268 |
| SOFTAG-2 | TQDPSRVG | SEQ ID NO: 269 |
| SPOT-TAG | PDRVRAVSHWSS | SEQ ID NO: 270 |
| STREP-TAG | WSHPQFEK | SEQ ID NO: 271 |
| TC TAG | CCPGCC | SEQ ID NO: 272 |
| TY TAG | EVHTNQDPLD | SEQ ID NO: 273 |
| V5 TAG | GKPIPNPLLGLDST | SEQ ID NO: 3 |
| VSV-TAG | YTDIEMNRLGK | SEQ ID NO: 275 |
| XPRESS TAG | DLYDDDDK | SEQ ID NO: 276 |

[0746] Peptide tags may also be the following affinity tags (for separation and/or purification of proteins) (as described in Table 9.9.1 of Kimple et al., “Overview of Affinity Tags for Protein Purification,” Curr Protoc Protein Sci, 2013, 73:Unit-9.9, which is incorporated herein by reference).

| NAME | AMINO ACID SEQUENCE | |
|---|---|---|
| AU1 EPITOPE | DTYRYI | SEQ ID NO: 278 |
| AU5 EPITOPE | TDFYLK | SEQ ID NO: 279 |
| BACTERIOPHAGE | MASMTGGQQMG | SEQ ID NO: 280 |
| T7 EPITOPE | | |
| (T7-TAG) | | |
| BLUETONGUE | QYPALT | SEQ ID NO: 281 |
| VIRUS | | |
| TAG (B-TAG) | | |
| E2 EPITOPE | SSTSSDFRDR | SEQ ID NO: 282 |
| HISTIDINE | KDHLIHNVHKEFHAHAHNK | SEQ ID NO: 283 |
| AFFINITY | | |
| TAG (HAT) | | |
| HSV EPITOPE | QPELAPED | SEQ ID NO: 284 |
| POLYARGININE | RRRRR | SEQ ID NO: 285 |
| (ARG-TAG) | | |
| POLYASPARTATE | CCCC | SEQ ID NO: 286 |
| (ASP-TAG) | | |
| POLY- | FFFFFFFFFFF | SEQ ID NO: 287 |
| PHENYLALANINE | | |
| (PHE-TAG) | | |
| S1-TAG | NANNPDWDF | SEQ ID NO: 288 |
| S-TAG | KETAAAKFERQHMDS | SEQ ID NO: 266 |
| VSV-G | YTDIEMNRLGK | SEQ ID NO: 275 |

[0747] In particular embodiments, the peptide tags may include a His tag, FLAG-tag, V5-tag, GCN4-tag, HA-tag, Myc-Tag, FIAsH/ReAsH-tag, Sortase substrate, pi-clamp.

[0748] In various embodiments, the peptide tags may be used for applications that include protein fluorescent labeling, immunoprecipitation, immunoblotting, immunohistochemistry, protein recruitment, inducible protein degrons, and genome-wide screening.

[0749] In various other embodiments, the peptide tag may include an intein sequence to install protein self-splicing function. As used herein, the term “intein” refers to auto-processing polypeptide domains found in organisms from all domains of life. An intein (intervening protein) carries out a unique auto-processing event known as protein splicing in which it excises itself out from a larger precursor polypeptide through the cleavage of two peptide bonds and, in the process, ligates the flanking extein (external protein) sequences through the formation of a new peptide bond. This rearrangement occurs post-translationally (or possibly co-translationally), as intein genes are found embedded in frame within other protein-coding genes. Furthermore, intein-mediated protein splicing is spontaneous; it requires no external factor or energy source, only the folding of the intein domain. This process is also known as cis-protein splicing, as opposed to the natural process of trans-protein splicing with “split inteins.” Inteins are the protein equivalent of the self-splicing RNA introns (see Perler et al., Nucleic Acids Res. 22:1125-1127 (1994)), which catalyze their own excision from a precursor protein with the concomitant fusion of the flanking protein sequences, known as exteins (reviewed in Perler et al., Curr. Opin. Chem. Biol. 1:292-299 (1997); Perler, F. B. Cell 92(1):1-4 (1998); Xu et al., EMBO J. 15(19):5146-5153 (1996)).

[0750] The mechanism of the protein splicing process has been studied in great detail (Chong, et al., J. Biol. Chem. 1996, 271, 22159-22168; Xu, M-Q & Perler, F. B. EMBO Journal, 1996, 15, 5146-5153) and conserved amino acids have been found at the intein and extein splicing points (Xu, et al., EMBO Journal, 1994, 13 5517-522).

[0751] Inteins can also exist as two fragments encoded by two separately transcribed and translated genes. These so-called split inteins self-associate and catalyze protein-splicing activity in trans. Split inteins have been identified in diverse cyanobacteria and archaea (Caspi et al, Mol Microbiol. 50: 1569-1577 (2003); Choi J. et al, J Mol Biol. 556: 1093-1106 (2006.); Dassa B. et al, Biochemistry. 46:322-330 (2007.); Liu X. and Yang J., J Biol Chem. 275:26315-26318 (2003); Wu H. et al. Proc Natl Acad Sci USA. £5:9226-9231 (1998.); and Zettler J. et al, FEBS Letters. 553:909-914 (2009)), but have not been found in eukaryotes thus far. Recently, a bioinformatic analysis of environmental metagenomic data revealed 26 different loci with a novel genomic arrangement. At each locus, a conserved enzyme coding region is interrupted by a split intein, with a freestanding endonuclease gene inserted between the sections coding for intein subdomains. Among them, five loci were completely assembled: DNA helicases (gp41-1, gp41-8); Inosine-5′-monophosphate dehydrogenase (IMPDH-1); and Ribonucleotide reductase catalytic subunits (NrdA-2 and NrdJ-1). This fractured gene organization appears to be present mainly in phages (Dassa et al, Nucleic Acids Research. 57:2560-2573 (2009)).

[0752] In certain embodiments, the prime editors described herein can be used to insert split-intein tags in two different proteins, causing their intracellular ligation when co-expressed to form a fusion protein. In protein trans-splicing, one precursor protein consists of an N-extein part followed by the N-intein, another precursor protein consists of the C-intein followed by a C-extein part, and a trans-splicing reaction (catalyzed by the N- and C-inteins together) excises the two intein sequences and links the two extein sequences with a peptide bond. Protein trans-splicing, being an enzymatic reaction, can work with very low (e.g., micromolar) concentrations of proteins and can be carried out under physiological conditions.

[0753] The split intein Npu DnaE was characterized as having the highest rate reported for the protein trans-splicing reaction. In addition, the Npu DnaE protein splicing reaction is considered robust and high-yielding with respect to different extein sequences, temperatures from 6 to 37° C., and the presence of up to 6M Urea (Zettler J. et al, FEBS Letters. 553:909-914 (2009); Iwai I. et al, FEBS Letters 550: 1853-1858 (2006)). As expected, when the Cysl Ala mutation at the N-domain of these inteins was introduced, the initial N to S- acyl shift and therefore protein splicing was blocked. Unfortunately, the C-terminal cleavage reaction was also almost completely inhibited. The dependence of the asparagine cyclization at the C-terminal splice junction on the acyl shift at the N-terminal scissile peptide bond seems to be a unique property common to the naturally split DnaE intein alleles (Zettler J. et al. FEBS Letters. 555:909-914 (2009)).

[0754] Protein trans-splicing, catalyzed by split inteins, provides an entirely enzymatic method for protein ligation. A split-intein is essentially a contiguous intein (e.g. a mini-intein) split into two pieces named N-intein and C-intein, respectively. The N-intein and C-intein of a split intein can associate non-covalently to form an active intein and catalyze the splicing reaction essentially in same way as a contiguous intein does. Split inteins have been found in nature and also engineered in laboratories. As used herein, the term “split intein” refers to any intein in which one or more peptide bond breaks exists between the N-terminal and C-terminal amino acid sequences such that the N-terminal and C-terminal sequences become separate molecules that can non-covalently reassociate, or reconstitute, into an intein that is functional for trans-splicing reactions. Any catalytically active intein, or fragment thereof, may be used to derive a split intein for use in the methods of the invention. For example, in one aspect the split intein may be derived from a eukaryotic intein. In another aspect, the split intein may be derived from a bacterial intein. In another aspect, the split intein may be derived from an archaeal intein. Preferably, the split intein so-derived will possess only the amino acid sequences essential for catalyzing trans-splicing reactions.

[0755] Split inteins may be created from contiguous inteins by engineering one or more split sites in the unstructured loop or intervening amino acid sequence between the −12 conserved beta-strands found in the structure of mini-inteins. Some flexibility in the position of the split site within regions between the beta-strands may exist, provided that creation of the split will not disrupt the structure of the intein, the structured beta-strands in particular, to a sufficient degree that protein splicing activity is lost.

[0756] The prime editors described herein may incorporate peptide tags (including inteins) into the C-terminal end of a protein of interest. In other embodiments, the peptide tags (including inteins) may be incorporated into the N-terminal end of a protein of interest. The peptide tags may also be incorporated into the interior of a protein of interest. The resulting fusion proteins created by the herein described prime editors may have the following structures:

[0757] [protein of interest]—[peptide tag];

[0758] [peptide tag]—[protein of interest]; or

[0759] [protein of interest—N-terminal region]—[peptide tag]—[protein of interest—C-terminal region].

[0760] The principles of guide RNA design for use in peptide tagging throughout may be applied to peptide tagging. For example, in one embodiment, the PEgRNA structure for peptide tagging may have the following structure: 5′-[spacer sequence]-[gRNA core or scaffold]-[extension arm]-3′, wherein the extension arm comprises in the 5′ to 3′ direction, a homology arm, edit template (comprising the sequence that encodes the peptide tag), and a primer binding site. This configuration is depicted in FIG. 3D and in FIG. 24.

[0761] In another embodiment, the PEgRNA structure for peptide tagging may have the following structure: 5′-[extension arm]-[spacer sequence]-[gRNA core or scaffold]-3′, wherein the extension arm comprises in the 5′ to 3′ direction, a homology arm, edit template (comprising the sequence that encodes the peptide tag), and a primer binding site. This configuration is depicted in FIG. 3E.

[0762] Embodiments of peptide tagging using prime editing is depicted in FIGS. 25 and 26 and described in Example 4.

[0763] E. Use of Prime Editing for Preventing or Treating Prion Disease

[0764] Prime editing can also be used to prevent or halt the progression of prion disease through the installation of one or more protective mutations into prion proteins (PRNP) which become misfolded during the course of disease. Prion diseases or transmissible spongiform encephalopathies (TSEs) are a family of rare progressive neurodegenerative disorders that affect both humans and animals. They are distinguished by long incubation periods, characteristic spongiform changes associated with neuronal loss, and a failure to induce inflammatory response.

[0765] In humans, prion disease includes Creutzfeldt-Jakob Disease (CJD), Variant Creutzfeldt-Jakob Disease (vCJD), Gerstmann-Straussler-Scheinker Syndrome, Fatal Familial Insomnia, and Kuru. In animals, prion disease includes Bovine Spongiform Encephalopathy (BSE or “mad cow disease”), Chronic Wasting Disease (CWD), Scrapie, Transmissible Mink Encephalopathy, Feline Spongiform Encephalopathy, and Ungulate Spongiform Encephalopathy. Prime editing may be used to install protective point mutations into a prion protein in order to prevent or halt the progression of any one of these prion diseases.

[0766] Classic CJD is a human prion disease. It is a neurodegenerative disorder with characteristic clinical and diagnostic features. This disease is rapidly progressive and always fatal. Infection with this disease leads to death usually within 1 year of onset of illness. CJD is a rapidly progressive, invariably fatal neurodegenerative disorder believed to be caused by an abnormal isoform of a cellular glycoprotein known as the prion protein. CJD occurs worldwide and the estimated annual incidence in many countries, including the United States, has been reported to be about one case per million population. The vast majority of CJD patients usually die within 1 year of illness onset. CJD is classified as a transmissible spongiform encephalopathy (TSE) along with other prion diseases that occur in humans and animals. In about 85% of patients, CJD occurs as a sporadic disease with no recognizable pattern of transmission. A smaller proportion of patients (5 to 15%) develop CJD because of inherited mutations of the prion protein gene. These inherited forms include Gerstmann-Straussler-Scheinker syndrome and fatal familial insomnia. No treatment is currently known for CJD.

[0767] Variant Creutzfeldt-Jakob disease (vCJD) is a prion disease that was first described in 1996 in the United Kingdom. There is now strong scientific evidence that the agent responsible for the outbreak of prion disease in cows, bovine spongiform encephalopathy (BSE or ‘mad cow’ disease), is the same agent responsible for the outbreak of vCJD in humans. Variant CJD (vCJD) is not the same disease as classic CJD (often simply called CJD). It has different clinical and pathologic characteristics from classic CJD. Each disease also has a particular genetic profile of the prion protein gene. Both disorders are invariably fatal brain diseases with unusually long incubation periods measured in years, and are caused by an unconventional transmissible agent called a prion. No treatment is currently known for vCJD.

[0768] BSE (bovine spongiform encephalopathy or “mad cow disease”) is a progressive neurological disorder of cattle that results from infection by an unusual transmissible agent called a prion. The nature of the transmissible agent is not well understood. Currently, the most accepted theory is that the agent is a modified form of a normal protein known as prion protein. For reasons that are not yet understood, the normal prion protein changes into a pathogenic (harmful) form that then damages the central nervous system of cattle. There is increasing evidence that there are different strains of BSE: the typical or classic BSE strain responsible for the outbreak in the United Kingdom and two atypical strains (H and L strains). No treatment is currently known for BSE.

[0769] Chronic wasting disease (CWD) is a prion disease that affects deer, elk, reindeer, sika deer and moose. It has been found in some areas of North America, including Canada and the United States, Norway and South Korea. It may take over a year before an infected animal develops symptoms, which can include drastic weight loss (wasting), stumbling, listlessness and other neurologic symptoms. CWD can affect animals of all ages and some infected animals may die without ever developing the disease. CWD is fatal to animals and there are no treatments or vaccines.

[0770] The causative agents of TSEs are believed to be prions. The term “prions” refers to abnormal, pathogenic agents that are transmissible and are able to induce abnormal folding of specific normal cellular proteins called prion proteins that are found most abundantly in the brain. The functions of these normal prion proteins are still not completely understood. The abnormal folding of the prion proteins leads to brain damage and the characteristic signs and symptoms of the disease. Prion diseases are usually rapidly progressive and always fatal.

[0771] As used herein, the term “prion” shall mean an infectious particle known to cause diseases (spongiform encephalopathies) in humans and animals. The term “prion” is a contraction of the words “protein” and “infection” and the particles are comprised largely if not exclusively of PRNP^{Sc} molecules encoded by a PRNP gene which expresses PRNP^{C} which changes conformation to become PRNP^{Sc}. Prions are distinct from bacteria, viruses and viroids. Known prions include those which infect animals to cause scrapie, a transmissible, degenerative disease of the nervous system of sheep and goats as well as bovine spongiform encephalopathies (BSE) or mad cow disease and feline spongiform encephalopathies of cats. Four prion diseases, as discussed above, known to affect humans are (1) kuru, (2) Creutzfeldt-Jakob Disease (CJD), (3) Gerstmann-Strassler-Scheinker Disease (GSS), and (4) fatal familial insomnia (FFI). As used herein prion includes all forms of prions causing all or any of these diseases or others in any animals used—and in particular in humans and in domesticated farm animals.

[0772] In general, and without wishing to be bound by theory, prior diseases are caused by misfolding of prion proteins. Such diseases—often called deposition diseases—the misfolding of the prion proteins can be accounted for as follows. If A is the normally synthesized gene product that carries out an intended physiologic role in a monomeric or oligomeric state, A* is a conformationally activated form of A that is competent to undergo a dramatic conformational change, B is the conformationally altered state that prefers multimeric assemblies (i.e., the misfolded form which forms depositions) and Bₙ is the multimeric material that is pathogenic and relatively difficult to recycle. For the prion diseases, PRNP^{C} and PRNP^{Sc} correspond to states A and Bₙ where A is largely helical and monomeric and Bₙ is β-rich and multimeric.

[0773] It is known that certain mutations in prion proteins can be associated with increased risk of prior disease. Conversely, certain mutations in prion proteins can be protective in nature. See Bagynszky et al., “Characterization of mutations in PRNP (prion) gene and their possible roles in neurodegenerative diseases,” Neuropsychiatr Dis Treat., 2018; 14: 2067-2085, the contents of which are incorporated herein by reference.

[0774] PRNP (NCBI RefSeq No. NP_000302.1 (SEQ ID NO: 291))—the human prion protein—is encoded by a 16 kb long gene, located on chromosome 20 (4686151-4701588). It contains two exons, and the exon 2 carries the open reading frame which encodes the 253 amino acid (AA) long PrP protein. Exon 1 is a noncoding exon, which may serve as transcriptional initiation site. The post-translational modifications result in the removal of the first 22 AA N-terminal fragment (NTF) and the last 23 AA C-terminal fragment (CTF). The NTF is cleaved after PrP transport to the endoplasmic reticulum (ER), while the CTF (glycosylphosphatidylinositol [GPI] signal peptide [GPI-SP]) is cleaved by the GPI anchor. GPI anchor could be involved in PrP protein transport. It may also play a role of attachment of prion protein into the outer surface of cell membrane. Normal PrP is composed of a long N-terminal loop (which contains the octapeptide repeat region), two short (3 sheets, three a helices, and a C-terminal region (which contains the GPI anchor). Cleavage of PrP results in a 208 AA long glyocoprotein, anchored in the cell membrane.

[0775] The amino acid sequence of PRNP (NP_000302.1) is as follows:

(SEQ ID NO: 291)
MANLGCWMLVLFVATWSDLGLCKKRPKPGGWNTGGSRYPGQGSPGGNRYPP
QGGGGWGQPHGGGWGQPHGGGWGQPHGGGWGQPHGGGWGQGGGTHSQWNKP
SKPKTNMKHMAGAAAAGAVVGGLGGYMLGSAMSRPIIHFGSDYEDRYYREN
MHRYPNQVYYRPMDEYSNQNNFVHDCVNITIKQHTVTTTTKGENFTETDVK
[sequence omitted]

[0776] The amino acid sequence of PRNP (NP_000302.1) is encoded by the following nucleotide sequence (NCBI Ref. Seq No. NM_000311.5, “Homo sapiens prion protein (PRNP), transcript variant 1, mRNA), is as follows:

(SEQ ID NO: 292)
GCGAACCTTGGCTGCTGGATGCTGGTTCTCTTTGTGGCCACATGGAGTGAC
CTGGGCCTCTGCAAGAAGCGCCCGAAGCCTGGAGGATGGAACACTGGGGGC
AGCCGATACCCGGGGCAGGGCAGCCCTGGAGGCAACCGCTACCCACCTCAG
GGCGGTGGTGGCTGGGGGCAGCCTCATGGTGGTGGCTGGGGGCAGCCTCAT
GGTGGTGGCTGGGGGCAGCCCCATGGTGGTGGCTGGGGACAGCCTCATGGT
GGTGGCTGGGGTCAAGGAGGTGGCACCCACAGTCAGTGGAACAAGCCGAGT
AAGCCAAAAACCAACATGAAGCACATGGCTGGTGCTGCAGCAGCTGGGGCA
GTGGTGGGGGGCCTTGGCGGCTACATGCTGGGAAGTGCCATGAGCAGGCCC
ATCATACATTTCGGCAGTGACTATGAGGACCGTTACTATCGTGAAAACATG
CACCGTTACCCCAACCAAGTGTACTACAGGCCCATGGATGAGTACAGCAAC
CAGAACAACTTTGTGCACGACTGCGTCAATATCACAATCAAGCAGCACACG
GTCACCACAACCACCAAGGGGGAGAACTTCACCGAGACCGACGTTAAGATG
ATGGAGCGCGTGGTTGAGCAGATGTGTATCACCCAGTACGAGAGGGAATCT
CAGGCCTATTACCAGAGAGGATCGAGCATGGTCCTCTTCTCCTCTCCACCT
GTGATCCTCCTGATCTCTTTCCTCATCTTCCTGATAGTGGGATGAGGAAGG
TCTTCCTGTTTTCACCATCTTTCTAATCTTTTTCCAGCTTGAGGGAGGCGG
TATCCACCTGCAGCCCTTTTAGTGGTGGTGTCTCACTCTTTCTTCTCTCTT
TGTCCCGGATAGGCTAATCAATACCCTTGGCACTGATGGGCACTGGAAAAC
ATAGAGTAGACCTGAGATGCTGGTCAAGCCCCCTTTGATTGAGTTCATCAT
GAGCCGTTGCTAATGCCAGGCCAGTAAAAGTATAACAGCAAATAACCATTG
GTTAATCTGGACTTATTTTTGGACTTAGTGCAACAGGTTGAGGCTAAAACA
AATCTCAGAACAGTCTGAAATACCTTTGCCTGGATACCTCTGGCTCCTTCA
GCAGCTAGAGCTCAGTATACTAATGCCCTATCTTAGTAGAGATTTCATAGC
TATTTAGAGATATTTTCCATTTTAAGAAAACCCGACAACATTTCTGCCAGG
TTTGTTAGGAGGCCACATGATACTTATTCAAAAAAATCCTAGAGATTCTTA
GCTCTTGGGATGCAGGCTCAGCCCGCTGGAGCATGAGCTCTGTGTGTACCG
AGAACTGGGGTGATGTTTTACTTTTCACAGTATGGGCTACACAGCAGCTGT
TCAACAAGAGTAAATATTGTCACAACACTGAACCTCTGGCTAGAGGACATA
TTCACAGTGAACATAACTGTAACATATATGAAAGGCTTCTGGGACTTGAAA
TCAAATGTTTGGGAATGGTGCCCTTGGAGGCAACCTCCCATTTTAGATGTT
TAAAGGACCCTATATGTGGCATTCCTTTCTTTAAACTATAGGTAATTAAGG
CAGCTGAAAAGTAAATTGCCTTCTAGACACTGAAGGCAAATCTCCTTTGTC
CATTTACCTGGAAACCAGAATGATTTTGACATACAGGAGAGCTGCAGTTGT
GAAAGCACCATCATCATAGAGGATGATGTAATTAAAAAATGGTCAGTGTGC
AAAGAAAAGAACTGCTTGCATTTCTTTATTTCTGTCTCATAATTGTCAAAA
ACCAGAATTAGGTCAAGTTCATAGTTTCTGTAATTGGCTTTTGAATCAAAG
AATAGGGAGACAATCTAAAAAATATCTTAGGTTGGAGATGACAGAAATATG
ATTGATTTGAAGTGGAAAAAGAAATTCTGTTAATGTTAATTAAAGTAAAAT
TATTCCCTGAATTGTTTGATATTGTCACCTAGCAGATATGTATTACTTTTC
TGCAATGTTATTATTGGCTTGCACTTTGTGAGTATTCTATGTAAAAATATA
TATGTATATAAAATATATATTGCATAGGACAGACTTAGGAGTTTTGTTTAG
AGCAGTTAACATCTGAAGTGTCTAATGCATTAACTTTTGTAAGGTACTGAA
TACTTAATATGTGGGAAACCCTTTTGCGTGGTCCTTAGGCTTACAATGTGC
ACTGAATCGTTTCATGTAAGAATCCAAAGTGGACACCATTAACAGGTCTTT
GAAATATGCATGTACTTTATATTTTCTATATTTGTAACTTTGCATGTTCTT
GTTTTGTTATATAAAAAAATTGTAAATGTTTAATATCTGACTGAAATTAAA
CGAGCGAAGATGAGCACCA

[0777] Mutation sites relative to PRNP (NP_000302.1) which are linked to CJD and FFI are reported are as follows. These mutations can be removed or installed using the prime editors disclosed herein.

| | AMINO ACID SEQUENCE OF MUTANT PRNP LINKED TO CJD PRION |
|---|---|
| | DISEASE (SEE TABLE 1 OF BAGYNSZKY ET AL., 2018) |
| MUTATION | (RELATIVE TO SEQ ID NO: 291 OF PRNP NP_000302.1) |
| D178N | MANLGCWMLVLFVATWSDLGLCKKRPKPGGWNTGGSRYPGQGSPGGNR |
| | YPPQGGGGWGQPHGGGWGQPHGGGWGQPHGGGWGQPHGGGWGQGG |
| | GTHSQWNKPSKPKTNMKHMAGAAAAGAVVGGLGGYMLGSAMSRPIIHF |
| | GSDYEDRYYRENMHRYPNQVYYRPMDEYSNQNNFVHNCVNITIKQHTVT |
| | TTTKGENFTETDVKMMERVVEQMCITQYERESQAYYQRGSSMVLFSSPPV |
| | ILLISFLIFLIVG (SEQ ID NO: 293) |
| T188K | MANLGCWMLVLFVATWSDLGLCKKRPKPGGWNTGGSRYPGQGSPGGNR |
| | YPPQGGGGWGQPHGGGWGQPHGGGWGQPHGGGWGQPHGGGWGQGG |
| | GTHSQWNKPSKPKTNMKHMAGAAAAGAVVGGLGGYMLGSAMSRPIIHF |
| | GSDYEDRYYRENMHRYPNQVYYRPMDEYSNQNNFVHDCVNITIKQHKVT |
| | TTTKGENFTETDVKMMERVVEQMCITQYERESQAYYQRGSSMVLFSSPPV |
| | ILLISFLIFLIVG (SEQ ID NO: 294) |
| E196K | MANLGCWMLVLFVATWSDLGLCKKRPKPGGWNTGGSRYPGQGSPGGNR |
| | YPPQGGGGWGQPHGGGWGQPHGGGWGQPHGGGWGQPHGGGWGQGG |
| | GTHSQWNKPSKPKTNMKHMAGAAAAGAVVGGLGGYMLGSAMSRPIIHF |
| | GSDYEDRYYRENMHRYPNQVYYRPMDEYSNQNNFVHDCVNITIKQHTVT |
| | TTTKGKNFTETDVKMMERVVEQMCITQYERESQAYYQRGSSMVLFSSPPV |
| | ILLISFLIFLIVG (SEQ ID NO: 295) |
| E196A | MANLGCWMLVLFVATWSDLGLCKKRPKPGGWNTGGSRYPGQGSPGGNR |
| | YPPQGGGGWGQPHGGGWGQPHGGGWGQPHGGGWGQPHGGGWGQGG |
| | GTHSQWNKPSKPKTNMKHMAGAAAAGAVVGGLGGYMLGSAMSRPIIHF |
| | GSDYEDRYYRENMHRYPNQVYYRPMDEYSNQNNFVHDCVNITIKQHTVT |
| | TTTKGANFTETDVKMMERVVEQMCITQYERESQAYYQRGSSMVLFSSPPV |
| | (SEQ ID NO: 296) |
| E200K | MANLGCWMLVLFVATWSDLGLCKKRPKPGGWNTGGSRYPGQGSPGGNR |
| | YPPQGGGGWGQPHGGGWGQPHGGGWGQPHGGGWGQPHGGGWGQGG |
| | GTHSQWNKPSKPKTNMKHMAGAAAAGAVVGGLGGYMLGSAMSRPIIHF |
| | GSDYEDRYYRENMHRYPNQVYYRPMDEYSNQNNFVHDCVNITIKQHTVT |
| | TTTKGENFTKTDVKMMERVVEQMCITQYERESQAYYQRGSSMVLFSSPPV |
| | ILLISFLIFLIVG (SEQ ID NO: 297) |
| E200G | MANLGCWMLVLFVATWSDLGLCKKRPKPGGWNTGGSRYPGQGSPGGNR |
| | YPPQGGGGWGQPHGGGWGQPHGGGWGQPHGGGWGQPHGGGWGQGG |
| | GTHSQWNKPSKPKTNMKHMAGAAAAGAVVGGLGGYMLGSAMSRPIIHF |
| | GSDYEDRYYRENMHRYPNQVYYRPMDEYSNQNNFVHDCVNITIKQHTVT |
| | TTTKGENFTGTDVKMMERVVEQMCITQYERESQAYYQRGSSMVLFSSPPV |
| | (SEQ ID NO: 298) |
| V203I | MANLGCWMLVLFVATWSDLGLCKKRPKPGGWNTGGSRYPGQGSPGGNR |
| | YPPQGGGGWGQPHGGGWGQPHGGGWGQPHGGGWGQPHGGGWGQGG |
| | GTHSQWNKPSKPKTNMKHMAGAAAAGAVVGGLGGYMLGSAMSRPIIHF |
| | GSDYEDRYYRENMHRYPNQVYYRPMDEYSNQNNFVHDCVNITIKQHTVT |
| | TTTKGENFTETDIKMMERVVEQMCITQYERESQAYYQRGSSMVLFSSPPVI |
| | LLISFLIFLIVG (SEQ ID NO: 299) |
| R208H | MANLGCWMLVLFVATWSDLGLCKKRPKPGGWNTGGSRYPGQGSPGGNR |
| | YPPQGGGGWGQPHGGGWGQPHGGGWGQPHGGGWGQPHGGGWGQGG |
| | GTHSQWNKPSKPKTNMKHMAGAAAAGAVVGGLGGYMLGSAMSRPIIHF |
| | GSDYEDRYYRENMHRYPNQVYYRPMDEYSNQNNFVHDCVNITIKQHTVT |
| | TTTKGENFTETDVKMMEHVVEQMCITQYERESQAYYQRGSSMVLFSSPPV |
| | ILLISFLIFLIVG (SEQ ID NO: 300) |
| V210I | MANLGCWMLVLFVATWSDLGLCKKRPKPGGWNTGGSRYPGQGSPGGNR |
| | YPPQGGGGWGQPHGGGWGQPHGGGWGQPHGGGWGQPHGGGWGQGG |
| | GTHSQWNKPSKPKTNMKHMAGAAAAGAVVGGLGGYMLGSAMSRPIIHF |
| | GSDYEDRYYRENMHRYPNQVYYRPMDEYSNQNNFVHDCVNITIKQHTVT |
| | TTTKGENFTETDVKMMERVIEQMCITQYERESQAYYQRGSSMVLFSSPPVI |
| | LLISFLIFLIVG (SEQ ID NO: 301) |
| E211Q | MANLGCWMLVLFVATWSDLGLCKKRPKPGGWNTGGSRYPGQGSPGGNR |
| | YPPQGGGGWGQPHGGGWGQPHGGGWGQPHGGGWGQPHGGGWGQGG |
| | GTHSQWNKPSKPKTNMKHMAGAAAAGAVVGGLGGYMLGSAMSRPIIHF |
| | GSDYEDRYYRENMHRYPNQVYYRPMDEYSNQNNFVHDCVNITIKQHTVT |
| | TTTKGENFTETDVKMMERVVQQMCITQYERESQAYYQRGSSMVLFSSPPV |
| | ILLISFLIFLIVG (SEQ ID NO: 302) |
| M232R | MANLGCWMLVLFVATWSDLGLCKKRPKPGGWNTGGSRYPGQGSPGGNR |
| | YPPQGGGGWGQPHGGGWGQPHGGGWGQPHGGGWGQPHGGGWGQGG |
| | GTHSQWNKPSKPKTNMKHMAGAAAAGAVVGGLGGYMLGSAMSRPIIHF |
| | GSDYEDRYYRENMHRYPNQVYYRPMDEYSNQNNFVHDCVNITIKQHTVT |
| | TTTKGENFTETDVKMMERVVEQMCITQYERESQAYYQRGSSRVLFSSPPVI |
| | LLISFLIFLIVG (SEQ ID NO: 303) |

[0778] Mutation sites relative to PRNP (NP_000302.1) (SEQ ID NO: 291) which are linked to GSS are reported, as follows:

| | AMINO ACID SEQUENCE OF MUTANT PRNP LINKED TO GSS PRION |
|---|---|
| | DISEASE (SEE TABLE 2 OF BAGYNSZKY ET AL., 2018) |
| MUTATION | (RELATIVE TO SEQ ID NO: 291 OF PRNP NP_000302.1) |
| P102L | MANLGCWMLVLFVATWSDLGLCKKRPKPGGWNTGGSRYPGQGSPGGNR |
| | YPPQGGGGWGQPHGGGWGQPHGGGWGQPHGGGWGQPHGGGWGQGG |
| | GTHSQWNKLSKPKTNMKHMAGAAAAGAVVGGLGGYMLGSAMSRPIIHF |
| | GSDYEDRYYRENMHRYPNQVYYRPMDEYSNQNNFVHDCVNITIKQHTVT |
| | TTTKGENFTETDVKMMERVVEQMCITQYERESQAYYQRGSSMVLFSSPPV |
| | ILLISFLIFLIVG (SEQ ID NO: 304) |
| P105L | MANLGCWMLVLFVATWSDLGLCKKRPKPGGWNTGGSRYPGQGSPGGNR |
| | YPPQGGGGWGQPHGGGWGQPHGGGWGQPHGGGWGQPHGGGWGQGG |
| | GTHSQWNKPS KLKTNMKHMAGAAAAGAVVGGLGGYMLGSAMSRPIIHF |
| | GSDYEDRYYRENMHRYPNQVYYRPMDEYSNQNNFVHDCVNITIKQHTVT |
| | TTTKGENFTETDVKMMERVVEQMCITQYERESQAYYQRGSSMVLFSSPPV |
| | ILLISFLIFLIVG (SEQ ID NO: 305) |
| A117V | MANLGCWMLVLFVATWSDLGLCKKRPKPGGWNTGGSRYPGQGSPGGNR |
| | YPPQGGGGWGQPHGGGWGQPHGGGWGQPHGGGWGQPHGGGWGQGG |
| | GTHSQWNKPSKPKTNMKHMAGAAVAGAVVGGLGGYMLGSAMSRPIIHF |
| | GSDYEDRYYRENMHRYPNQVYYRPMDEYSNQNNFVHDCVNITIKQHTVT |
| | TTTKGENFTETDVKMMERVVEQMCITQYERESQAYYQRGSSMVLFSSPPV |
| | ILLISFLIFLIVG (SEQ ID NO: 306) |
| G131V | MANLGCWMLVLFVATWSDLGLCKKRPKPGGWNTGGSRYPGQGSPGGNR |
| | YPPQGGGGWGQPHGGGWGQPHGGGWGQPHGGGWGQPHGGGWGQGG |
| | GTHSQWNKPSKPKTNMKHMAGAAAAGAVVGGLGGYMLVSAMSRPIIHF |
| | GSDYEDRYYRENMHRYPNQVYYRPMDEYSNQNNFVHDCVNITIKQHTVT |
| | TTTKGENFTETDVKMMERVVEQMCITQYERESQAYYQRGSSMVLFSSPPV |
| | ILLISFLIFLIVG (SEQ ID NO: 307) |
| V176G | MANLGCWMLVLFVATWSDLGLCKKRPKPGGWNTGGSRYPGQGSPGGNR |
| | YPPQGGGGWGQPHGGGWGQPHGGGWGQPHGGGWGQPHGGGWGQGG |
| | GTHSQWNKPSKPKTNMKHMAGAAAAGAVVGGLGGYMLGSAMSRPIIHF |
| | GSDYEDRYYRENMHRYPNQVYYRPMDEYSNQNNFGHDCVNITIKQHTVT |
| | TTTKGENFTETDVKMMERVVEQMCITQYERESQAYYQRGSSMVLFSSPPV |
| | ILLISFLIFLIVG (SEQ ID NO: 308) |
| H187R | MANLGCWMLVLFVATWSDLGLCKKRPKPGGWNTGGSRYPGQGSPGGNR |
| | YPPQGGGGWGQPHGGGWGQPHGGGWGQPHGGGWGQPHGGGWGQGG |
| | GTHS QWNKPS KPKTNMKHMAGAAAAGAVVGGLGGYMLGSAMSRPIIHF |
| | GSDYEDRYYRENMHRYPNQVYYRPMDEYSNQNNFVHDCVNITIKQRTVT |
| | TTTKGENFTETDVKMMERVVEQMCITQYERESQAYYQRGSSMVLFSSPPV |
| | ILLISFLIFLIVG (SEQ ID NO: 309) |
| | MANLGCWMLVLFVATWSDLGLCKKRPKPGGWNTGGSRYPGQGSPGGNR |
| | YPPQGGGGWGQPHGGGWGQPHGGGWGQPHGGGWGQPHGGGWGQGG |
| | GTHSQWNKPSKPKTNMKHMAGAAAAGAVVGGLGGYMLGSAMSRPIIHF |
| | GSDYEDRYYRENMHRYPNQVYYRPMDEYSNQNNFVHDCVNITIKQHTVT |
| | TTTKGENFTETDVKMMERVVEQMCITQYERESQAYYQRGSSMVLFSSPPV |
| | ILLISFLIFLIVG (SEQ ID NO: 291) |
| F198S | MANLGCWMLVLFVATWSDLGLCKKRPKPGGWNTGGSRYPGQGSPGGNR |
| | YPPQGGGGWGQPHGGGWGQPHGGGWGQPHGGGWGQPHGGGWGQGG |
| | GTHSQWNKPSKPKTNMKHMAGAAAAGAVVGGLGGYMLGSAMSRPIIHF |
| | GSDYEDRYYRENMHRYPNQVYYRPMDEYSNQNNFVHDCVNITIKQHTVT |
| | TTTKGENSTETDVKMMERVVEQMCITQYERESQAYYQRGSSMVLFSSPPV |
| | ILLISFLIFLIVG (SEQ ID NO: 311) |
| D202N | MANLGCWMLVLFVATWSDLGLCKKRPKPGGWNTGGSRYPGQGSPGGNR |
| | YPPQGGGGWGQPHGGGWGQPHGGGWGQPHGGGWGQPHGGGWGQGG |
| | GTHSQWNKPSKPKTNMKHMAGAAAAGAVVGGLGGYMLGSAMSRPIIHF |
| | GSDYEDRYYRENMHRYPNQVYYRPMDEYSNQNNFVHDCVNITIKQHTVT |
| | TTTKGENFTETNVKMMERVVEQMCITQYERESQAYYQRGSSMVLFSSPPV |
| | ILLISFLIFLIVG (SEQ ID NO: 312) |
| Q212P | MANLGCWMLVLFVATWSDLGLCKKRPKPGGWNTGGSRYPGQGSPGGNR |
| | YPPQGGGGWGQPHGGGWGQPHGGGWGQPHGGGWGQPHGGGWGQGG |
| | GTHSQWNKPSKPKTNMKHMAGAAAAGAVVGGLGGYMLGSAMSRPIIHF |
| | GSDYEDRYYRENMHRYPNQVYYRPMDEYSNQNNFVHDCVNITIKQHTVT |
| | TTTKGENFTETDVKMMERVVEPMCITQYERESQAYYQRGSSMVLFSSPPV |
| | ILLISFLIFLIVG (SEQ ID NO: 313) |
| Q217R | MANLGCWMLVLFVATWSDLGLCKKRPKPGGWNTGGSRYPGQGSPGGNR |
| | YPPQGGGGWGQPHGGGWGQPHGGGWGQPHGGGWGQPHGGGWGQGG |
| | GTHSQWNKPSKPKTNMKHMAGAAAAGAVVGGLGGYMLGSAMSRPIIHF |
| | GSDYEDRYYRENMHRYPNQVYYRPMDEYSNQNNFVHDCVNITIKQHTVT |
| | TTTKGENFTETDVKMMERVVEQMCITRYERESQAYYQRGSSMVLFSSPPV |
| | ILLISFLIFLIVG (SEQ ID NO: 314) |
| M232T | MANLGCWMLVLFVATWSDLGLCKKRPKPGGWNTGGSRYPGQGSPGGNR |
| | YPPQGGGGWGQPHGGGWGQPHGGGWGQPHGGGWGQPHGGGWGQGG |
| | GTHSQWNKPSKPKTNMKHMAGAAAAGAVVGGLGGYMLGSAMSRPIIHF |
| | GSDYEDRYYRENMHRYPNQVYYRPMDEYSNQNNFVHDCVNITIKQHTVT |
| | TTTKGENFTETDVKMMERVVEQMCITQYERESQAYYQRGSSTVLFSSPPVI |
| | LLISFLIFLIVG (SEQ ID NO: 315) |

[0779] Mutation sites relative to PRNP (NP_000302.1) (SEQ ID NO: 291) which are linked to a possible protective nature against prion disease, as follows:

| | AMINO ACID SEQUENCE OF MUTANT PRNP LINKED TO A PROTECTIVE |
|---|---|
| | NATURE AGAINST PRION DISEASE (SEE TABLE 4 OF BAGYNSZKY ET |
| MUTATION | AL., 2018) (RELATIVE TO SEQ ID NO: 291 OF PRNP NP_000302.1) |
| G127S | MANLGCWMLVLFVATWSDLGLCKKRPKPGGWNTGGSRYPGQGSPGGNR |
| | YPPQGGGGWGQPHGGGWGQPHGGGWGQPHGGGWGQPHGGGWGQGG |
| | GTHSQWNKPSKPKTNMKHMAGAAAAGAVVGGLGSYMLGSAMSRPIIHF |
| | GSDYEDRYYRENMHRYPNQVYYRPMDEYSNQNNFVHDCVNITIKQHTVT |
| | TTTKGENFTETDVKMMERVVEQMCITQYERESQAYYQRGSSMVLFSSPPV |
| | ILLISFLIFLIVG (SEQ ID NO: 316) |
| G127V | MANLGCWMLVLFVATWSDLGLCKKRPKPGGWNTGGSRYPGQGSPGGNR |
| | YPPQGGGGWGQPHGGGWGQPHGGGWGQPHGGGWGQPHGGGWGQGG |
| | GTHSQWNKPSKPKTNMKHMAGAAAAGAVVGGLGVYMLGSAMSRPIIHF |
| | GSDYEDRYYRENMHRYPNQVYYRPMDEYSNQNNFVHDCVNITIKQHTVT |
| | TTTKGENFTETDVKMMERVVEQMCITQYERESQAYYQRGSSMVLFSSPPV |
| | ILLISFLIFLIVG (SEQ ID NO: 317) |
| M129V | MANLGCWMLVLFVATWSDLGLCKKRPKPGGWNTGGSRYPGQGSPGGNR |
| | YPPQGGGGWGQPHGGGWGQPHGGGWGQPHGGGWGQPHGGGWGQGG |
| | GTHSQWNKPSKPKTNMKHMAGAAAAGAVVGGLGGYVLGSAMSRPIIHF |
| | GSDYEDRYYRENMHRYPNQVYYRPMDEYSNQNNFVHDCVNITIKQHTVT |
| | TTTKGENFTETDVKMMERVVEQMCITQYERESQAYYQRGSSMVLFSSPPV |
| | ILLISFLIFLIVG (SEQ ID NO: 318) |
| D167G | MANLGCWMLVLFVATWSDLGLCKKRPKPGGWNTGGSRYPGQGSPGGNR |
| | YPPQGGGGWGQPHGGGWGQPHGGGWGQPHGGGWGQPHGGGWGQGG |
| | GTHSQWNKPSKPKTNMKHMAGAAAAGAVVGGLGGYMLGSAMSRPIIHF |
| | GSDYEDRYYRENMHRYPNQVYYRPMGEYSNQNNFVHDCVNITIKQHTVT |
| | TTTKGENFTETDVKMMERVVEQMCITQYERESQAYYQRGSSMVLFSSPPV |
| | ILLISFLIFLIVG (SEQ ID NO: 319) |
| D167N | MANLGCWMLVLFVATWSDLGLCKKRPKPGGWNTGGSRYPGQGSPGGNR |
| | YPPQGGGGWGQPHGGGWGQPHGGGWGQPHGGGWGQPHGGGWGQGG |
| | GTHSQWNKPSKPKTNMKHMAGAAAAGAVVGGLGGYMLGSAMSRPIIHF |
| | GSDYEDRYYRENMHRYPNQVYYRPMNEYSNQNNFVHDCVNITIKQHTVT |
| | TTTKGENFTETDVKMMERVVEQMCITQYERESQAYYQRGSSMVLFSSPPV |
| | ILLISFLIFLIVG (SEQ ID NO: 320) |
| N171S | MANLGCWMLVLFVATWSDLGLCKKRPKPGGWNTGGSRYPGQGSPGGNR |
| | YPPQGGGGWGQPHGGGWGQPHGGGWGQPHGGGWGQPHGGGWGQGG |
| | GTHSQWNKPSKPKTNMKHMAGAAAAGAVVGGLGGYMLGSAMSRPIIHF |
| | GSDYEDRYYRENMHRYPNQVYYRPMDEYSSQNNFVHDCVNITIKQHTVT |
| | TTTKGENFTETDVKMMERVVEQMCITQYERESQAYYQRGSSMVLFSSPPV |
| | ILLISFLIFLIVG (SEQ ID NO: 321) |
| E219K | MANLGCWMLVLFVATWSDLGLCKKRPKPGGWNTGGSRYPGQGSPGGNR |
| | YPPQGGGGWGQPHGGGWGQPHGGGWGQPHGGGWGQPHGGGWGQGG |
| | GTHSQWNKPSKPKTNMKHMAGAAAAGAVVGGLGGYMLGSAMSRPIIHF |
| | GSDYEDRYYRENMHRYPNQVYYRPMDEYSNQNNFVHDCVNITIKQHTVT |
| | TTTKGENFTETDVKMMERVVEQMCITQYKRESQAYYQRGSSMVLFSSPPV |
| | ILLISFLIFLIVG (SEQ ID NO: 322) |
| P238S | MANLGCWMLVLFVATWSDLGLCKKRPKPGGWNTGGSRYPGQGSPGGNR |
| | YPPQGGGGWGQPHGGGWGQPHGGGWGQPHGGGWGQPHGGGWGQGG |
| | GTHSQWNKPSKPKTNMKHMAGAAAAGAVVGGLGGYMLGSAMSRPIIHF |
| | GSDYEDRYYRENMHRYPNQVYYRPMDEYSNQNNFVHDCVNITIKQHTVT |
| | TTTKGENFTETDVKMMERVVEQMCITQYERESQAYYQRGSSMVLFSSSPV |
| | ILLISFLIFLIVG (SEQ ID NO: 323) |

[0780] Thus, in various embodiments, prime editing may be used to remove a mutation in PRNP that is linked to prion disease or install a mutation in PRNP that is considered to be protective against prion disease. For example, prime editing may be use to remove or restore a D178N, V1801, T188K, E196K, E196A, E200K, E200G, V2031, R208H, V2101, E211Q, I215V, or M232R mutation in the PRNP protein (relative to PRNP of NP_000302.1) (SEQ ID NO: 291). In other embodiments, prime editing may be use to remove or restore a P102L, P105L, A1 17V, G131V, V176G, H187R, F198S, D202N, Q212P, Q217R, or M232T mutation in the PRNP protein (relative to PRNP of NP_000302.1) (SEQ ID NO: 291). By removing or correcting for the presence of such mutations in PRNP using prime editing, the risk of prion disease may be reduced or eliminated.

[0781] In other embodiments, prime editing may be used to install a protective mutation in PRNP that is linked to a protective effect against one or more prion diseases. For example, prime editing may be used to install a G127S, G127V, M129V, D167G, D167N, N171S, E219K, or P238S protective mutation in PRNP (relative to PRNP of NP_000302.1) (SEQ ID NO: 291). In still other embodiments, the protective mutation may be any alternate amino acid installed at G127, G127, M129, D167, D167, N171, E219, or P238 in PRNP (relative to PRNP of NP_000302.1) (SEQ ID NO: 291).

[0782] In particular embodiments, prime editing may be used to install a G127V protective mutation in PRNP, as illustrated in FIG. 27 and discussed in Example 5.

[0783] In another embodiment, prime editing may be used to install an E219K protective mutation in PRNP.

[0784] The PRNP protein and the protective mutation site are conserved in mammals, so in addition to treating human disease it could also be used to generate cows and sheep that are immune to prion disease, or even help cure wild populations of animals that are suffering from prion disease. Prime editing has already been used to achieve ˜25% installation of a naturally occurring protective allele in human cells, and previous mouse experiments indicate that this level of installation is sufficient to cause immunity from most prion diseases. This method is the first and potentially only current way to install this allele with such high efficiency in most cell types. Another possible strategy for treatment is to use prime editing to reduce or eliminate the expression of PRNP by installing an early stop codon in the gene.

[0785] Using the principles described herein for PEgRNA design, appropriate PEgRNAs may be designed for installing desired protective mutations, or for removing prion disease-associated mutations from PRNP. For example, the below list of PEgRNAs can be used to install the G127V protective allele and the E219K protective allele in human PRNP, as well as the G127V protective allele in PRNP of various animals.

HUMAN PEGRNA FOR INSTALLATION OF G127V IN HUMAN
PRNP:
(SEQ ID NO: 324)
GCAGTGGTGGGGGGCCTTGGGTTTTAGAGCTAGAAATAGCAAGTTAAAAT
AAGGCTAGTCCGTTATCAACTTGAAAAAGTGGCACCGAGTCGGTGCATGT
AGACGCCAAGGCCCCCCAC
HUMAN PEGRNA FOR INSTALLATION OF E219K IN HUMAN
PRNP
(SEQ ID NO: 325)
TGTGTATCACCCAGTACGAGGTTTTAGAGCTAGAAATAGCAAGTTAAAAT
AAGGCTAGTCCGTTATCAACTTGAAAAAGTGGCACCGAGTCGGTGC AGA
TTCTCTCTTGTACTGGGTGA
COW (BOS TAURUS) PEGRNA FOR INSTALLATION OF G127V
IN COW PRNP
(SEQ ID NO: 326)
GCAGTGGTAGGGGGCCTTGGGTTTTAGAGCTAGAAATAGCAAGTTAAAAT
AAGGCTAGTCCGTTATCAACTTGAAAAAGTGGCACCGAGTCGGTGCATGT
AGACACCAAGGCCCCCTAC
HAMSTER (MESOCRICETUS AURATUS) PEGRNA FOR
INSTALLATION OF G127V IN HAMSTER PRNP
(SEQ ID NO: 327)
GCCGTGGTGGGGGGCCTTGGGTTTTAGAGCTAGAAATAGCAAGTTAAAAT
AAGGCTAGTCCGTTATCAACTTGAAAAAGTGGCACCGAGTCGGTGCATGT
AGACACCAAGGCCCCCCAC
MOUSE (MUS MUSCULUS) PEGRNA FOR INSTALLATION OF
G127V IN MOUST PRNP
(SEQ ID NO: 328)
GCAGTAGTGGGGGGCCTTGGGTTTTAGAGCTAGAAATAGCAAGTTAAAAT
AAGGCTAGTCCGTTATCAACTTGAAAAAGTGGCACCGAGTCGGTGCATGT
AGACACCAAGGCCCCCCAC
DEER (ODOCOILEUS VIRGINIANUS) PEGRNA FOR
INSTALLATION OF G127V IN DEER PNRP
(SEQ ID NO: 329)
GCAGTGGTAGGGGGCCTTGGGTTTTAGAGCTAGAAATAGCAAGTTAAAAT
AAGGCTAGTCCGTTATCAACTTGAAAAAGTGGCACCGAGTCGGTGCATGT
AGACACCAAGGCCCCCTAC
FERRET (MUSTELA PUTORIUS FURO) PEGRNA FOR
INSTALLATION OF G127V IN FERRET PRNP
(SEQ ID NO: 330)
GCGGTTGTGGGGGGCCTGGGGTTTTAGAGCTAGAAATAGCAAGTTAAAAT
AAGGCTAGTCCGTTATCAACTTGAAAAAGTGGCACCGAGTCGGTGCATGT
AGACGCCCAGGCCCCCCAC
KEY:
SPACER IS BOLDED.
SGRNA SCAFFOLD IS NORMAL TEXT.
RT TEMPLATE IS ONCE UNDERLINED.
PBS IS TWICE UNDERLINED.

[0786] F. Use of Prime Editing for RNA Tagging

[0787] Prime editing may also be used to manipulate, alter, and otherwise modify the sequences of DNA encoding RNA functions through RNA tagging, and in this way provides a means to indirectly modify the structure and function of RNA. For example, PE can be used to insert motifs that are functional at the RNA level (hereafter RNA motifs) to tag or otherwise manipulate non-coding RNAs or mRNAs. These motifs could serve to increase gene expression, decrease gene expression, alter splicing, change post-transcriptional modification, affect the sub-cellular location of the RNA, enable isolation or determination of the intra- or extra-cellular location of the RNA (using, for instance, fluorescent RNA aptamers such as Spinach, Spinach2, Baby Spinach, or Broccoli), recruit endogenous or exogenous protein or RNA binders, introduce sgRNAs, or induce processing of the RNA, by either self-cleavage or RNAses (see FIG. 28B and Example 6 for further details).

[0788] The following RNA tags or motifs may be inserted into a gene of interest using prime editing with an appropriate PEgRNA (designed using the guidance provided herein) to affect various properties of RNA, including RNA transport, expression level, splicing, and detection.

| | | | EXEMPLARY |
|---|---|---|---|
| | | | PEGRNA FOR PRIME |
| | | | EDITING INSERTION |
| | | | OF RNA MOTIF INTO |
| | | FUNCTION/ | THE EXEMPLARY |
| RNA MOTIF | SEQUENCE OF RNA MOTIF | EFFECT | HEXA GENE* |
| POLYOMAVIRUS | AACTTGTTTATTGCAGCTT | TERMINATION | ATCCTTCCAGTCAG |
| SIMIAN | ATAATGGTTACAAATAAAG | OF | GGCCATGTTTGAGA |
| VIRUS 40 | CAATAGCATCACAAATTTC | TRANSCRIPTION | GCTAGAAATAGCAA |
| (SV40) TYPE1 | ACAAATAAAGCATTTTTTT | OF THE | GTTTAAATAAGGCT |
| | CACTGCATTCTAGTTGTGG | TAGGED | AGTCCGTTATCAAC |
| | TTTGTCCAAACTCATCAAT | GENE; | TTGAAAAAGTGGG |
| | GTATCTTA (SEQ ID NO: | TRANSPORT | ACCGAGTCGGTCCA |
| | 331) | OF MRNA | CCTGAACCGTATATC |
| | | INTO | TAAGATACATTGAT |
| | | CYTOSOL; | GAGTTTGGACAAA |
| | | INCREASED | CCACAACTAGAAT |
| | | RNA | GCAGTGAAAAAAA |
| | | STABILITY | TGCTTTATTTGTG |
| | | AND | AAATTTGTGATGC |
| | | EXPRESSION | TATTGCTTTATTTG |
| | | OF ENCODED | TAACCATTATAAGC |
| | | PROTEIN | TGCAATAAACAAG |
| | | | TTCTATGGCCCTGA |
| | | | CTGGAA |
| | | | (SEQ ID NO: 332) |
| POLYOMAVIRUS | CCATGGCCCAACTTGTTTA | TERMINATION | ATCCTTCCAGTCAG |
| SIMIAN | TTGCAGCTTATAATGGTTA | OF | GGCCATGTTTGAGA |
| VIRUS 40 | CAAATAAAGCAATAGCAT | TRANSCRIPTION | GCTAGAAATAGCAA |
| (SV40) TYPE2 | CACAAATTTCACAAATAA | OF THE | GTTTAAATAAGGCT |
| | AGCATTTTTTTCACTGCAT | TAGGED | AGTCCGTTATCAAC |
| | TCTAGTTGTGGTTTGTCCA | GENE; | TTGAAAAAGTGGG |
| | AACTCATCAATGTATCTTA | TRANSPORT | ACCGAGTCGGTCCA |
| | TCATGTCTGGATCTC (SEQ | OF MRNA | CCTGAACCGTATATC |
| | ID NO: 333) | INTO | GAGATCCAGACAT |
| | | CYTOSOL; | GATAAGATACATT |
| | | INCREASED | GATGAGTTTGGAC |
| | | RNA | AAACCACAACTAG |
| | | STABILITY | AATGCAGTGAAAA |
| | | AND | AAATGCTTTATTT |
| | | EXPRESSION | GTGAAATTTGTGA |
| | | OF ENCODED | TGCTATTGCTTTAT |
| | | PROTEIN | TTGTAACCATTATA |
| | | | AGCTGCAATAAAC |
| | | | AAGTTGGGCCATG |
| | | | GCTATGGCCCTGAC |
| | | | TGGAA |
| | | | (SEQ ID NO: 334) |
| POLYOMAVIRUS | TGATCATAATCAAGCCATA | TERMINATION | ATCCTTCCAGTCAG |
| SIMIAN | TCACATCTGTAGAGGTTTA | OF | GGCCATGTTTGAGA |
| VIRUS 40 | CTTGCTTTAAAAAACCTC | TRANSCRIPTION | GCTAGAAATAGCAA |
| (SV40) TYPE3 | CACACCTCCCCCTGAACC | OF THE | GTTTAAATAAGGCT |
| | TGAAACATAAAATGAATG | TAGGED | AGTCCGTTATCAAC |
| | CAATTGTTGTTGTTAACTT | GENE; | TTGAAAAAGTGGG |
| | GTTTATTGCAGCTTATAAT | TRANSPORT | ACCGAGTCGGTCCA |
| | GGTTACAAATAAAGCAAT | OF MRNA | CCTGAACCGTATATC |
| | AGCATCACAAATTTCACA | INTO | GCAGATCCAGACA |
| | AATAAAGCATTTTTTTCAC | CYTOSOL; | TGATAAGATACATT |
| | TGCATTCTAGTTGTGGTTT | INCREASED | GATGAGTTTGGAC |
| | GTCCAAACTCATCAATGTA | RNA | AAACCACAACTAG |
| | TCTTATCATGTCTGGATCT | STABILITY | AATGCAGTGAAAA |
| | GC (SEQ ID NO: 335) | AND | AAATGCTTTATTT |
| | | EXPRESSION | GTGAAATTTGTGA |
| | | OF ENCODED | TGCTATTGCTTTAT |
| | | PROTEIN | TTGTAACCATTATA |
| | | | AGCTGCAATAAAC |
| | | | AAGTTAACAACAA |
| | | | CAATTGCATTCAT |
| | | | TTTATGTTTCAGG |
| | | | TTCAGGGGGAGG |
| | | | TGTGGAGGTTTTT |
| | | | TAAAGCAAGTAAA |
| | | | CCTCTACAGATGT |
| | | | GATATGGCTTGAT |
| | | | TATGATCACTATGG |
| | | | CCCTGACTGGAA |
| | | | (SEQ ID NO: 336) |
| HUMAN | ACGGGTGGCATCCCTGTG | TRANSPORT | ATCCTTCCAGTCAG |
| GROWTH | ACCCCTCCCCAGTGCCTC | OF RNA INTO | GGCCATGTTTGAGA |
| HORMONE | TCCTGGCCCTGGAAGTTG | CYTOPLASM; | GCTAGAAATAGCAA |
| (HGH) | CCACTCCAGTGCCCACCA | ENHANCED | GTTTAAATAAGGCT |
| | GCCTTGTCCTAATAAAATT | RNA | AGTCCGTTATCAAC |
| | AAGTTGCATCATTTTGTCT | STABILITY | TTGAAAAAGTGGG |
| | GACTAGGTGTCCTTCTATA | AND | ACCGAGTCGGTCCA |
| | ATATTATGGGGTGGAGGG | EXPRESSION | CCTGAACCGTATATC |
| | GGGTGGTATGGAGCAAGG | OF ENCODED | AAGGACAGGGAA |
| | GGCAAGTTGGGAAGACA | PROTEIN | GGGAGCAGTGGT |
| | ACCTGTAGGGCCTGCGGG | | TCACGCCTGTAAT |
| | GTCTATTGGGAACCAAGC | | CCCAGCAATTTGG |
| | TGGAGTGCAGTGGCACAA | | GAGGCCAAGGTG |
| | TCTTGGCTCACTGCAATCT | | GGTAGATCACCTG |
| | CCGCCTCCTGGGTTCAAG | | AGATTAGGAGTTG |
| | CGATTCTCCTGCCTCAGCC | | GAGACCAGCCTG |
| | TCCCGAGTTGTTGGGATT | | GCCAATATGGTGA |
| | CCAGGCATGCATGACCAG | | AACCCCGTCTCTA |
| | GCTCAGCTAATTTTTGTTT | | CCAAAAAAACAAA |
| | TTTTGGTAGAGACGGGGT | | AATTAGCTGAGCC |
| | TTCACCATATTGGCCAGGC | | TGGTCATGCATGC |
| | TGGTCTCCAACTCCTAATC | | CTGGAATCCCAAC |
| | TCAGGTGATCTACCCACCT | | AACTCGGGAGGCT |
| | TGGCCTCCCAAATTGCTG | | GAGGCAGGAGAAT |
| | GGATTACAGGCGTGAACC | | CGCTTGAACCCAG |
| | ACTGCTCCCTTCCCTGTCC | | GAGGCGGAGATTG |
| | TT (SEQ ID NO: 337) | | CAGTGAGCCAAGA |
| | | | TTGTGCCACTGCA |
| | | | CTCCAGCTTGGTT |
| | | | CCCAATAGACCCC |
| | | | GCAGGCCCTACAG |
| | | | GTTGTCTTCCCAA |
| | | | CTTGCCCCTTGCT |
| | | | CCATACCACCCCC |
| | | | CTCCACCCCATAA |
| | | | TATTATAGAAGGA |
| | | | CACCTAGTCAGAC |
| | | | AAAATGATGCAAC |
| | | | TTAATTTTATTAGG |
| | | | ACAAGGCTGGTG |
| | | | GGCACTGGAGTG |
| | | | GCAACTTCCAGGG |
| | | | CCAGGAGAGGCA |
| | | | CTGGGGAGGGGT |
| | | | CACAGGGATGCCA |
| | | | CCCGTCTATGGCCC |
| | | | TGACTGGAA |
| | | | (SEQ ID NO: 338) |
| BOVINE | CGACTGTGCCTTCTAGTTG | TRANSPORT | ATCCTTCCAGTCAG |
| GROWTH | CCAGCCATCTGTTGTTTGC | OF RNA INTO | GGCCATGTTTGAGA |
| HORMONE | CCCTCCCCCGTGCCTTCCT | CYTOPLASM; | GCTAGAAATAGCAA |
| (BGH) | TGACCCTGGAAGGTGCCA | ENHANCED | GTTTAAATAAGGCT |
| | CTCCCACTGTCCTTTCCTA | RNA | AGTCCGTTATCAAC |
| | ATAAAATGAGGAAATTGC | STABILITY | TTGAAAAAGTGGG |
| | ATCGCATTGTCTGAGTAGG | AND | ACCGAGTCGGTCCA |
| | TGTCATTCTATTCTGGGGG | EXPRESSION | CCTGAACCGTATATC |
| | GTGGGGTGGGGCAGGAC | OF ENCODED | CCATAGAGCCCAC |
| | AGCAAGGGGGAGGATTG | PROTEIN | CGCATCCCCAGCA |
| | GGAAGACAATAGCAGGCA | | TGCCTGCTATTGT |
| | TGCTGGGGATGCGGTGGG | | CTTCCCAATCCTC |
| | CTCTATGG (SEQ ID NO: | | CCCCTTGCTGTCC |
| | 339) | | TGCCCCACCCCAC |
| | | | CCCCCAGAATAGA |
| | | | ATGACACCTACTC |
| | | | AGACAATGCGATG |
| | | | CAATTTCCTCATTT |
| | | | TATTAGGAAAGGA |
| | | | CAGTGGGAGTGG |
| | | | CACCTTCCAGGGT |
| | | | CAAGGAAGGCAC |
| | | | GGGGGAGGGGCA |
| | | | AACAACAGATGGC |
| | | | TGGCAACTAGAAG |
| | | | GCACAGTCGCTAT |
| | | | GGCCCTGACTGGAA |
| | | | (SEQ ID NO: 340) |
| RABBIT | TTCACTCCTCAGGTGCAG | TRANSPORT | ATCCTTCCAGTCAG |
| BETA- | GCTGCCTATCAGAAGGTG | OF RNA INTO | GGCCATGTTTGAGA |
| GLOBIN | GTGGCTGGTGTGGCCAAT | CYTOPLASM; | GCTAGAAATAGCAA |
| (RBGLOB) | GCCCTGGCTCACAAATAC | ENHANCED | GTTTAAATAAGGCT |
| | CACTGAGATCTTTTTCCCT | RNA | AGTCCGTTATCAAC |
| | CTGCCAAAAATTATGGGG | STABILITY | TTGAAAAAGTGGG |
| | ACATCATGAAGCCCCTTG | AND | ACCGAGTCGGTCCA |
| | AGCATCTGACTTCTGGCTA | EXPRESSION | CCTGAACCGTATATC |
| | ATAAAGGAAATTTATTTTC | OF ENCODED | GATCTCCATAAGA |
| | ATTGCAATAGTGTGTTGGA | PROTEIN | GAAGAGGGACAG |
| | ATTTTTTGTGTCTCTCACT | | CTATGACTGGGAG |
| | CGGAAGGACATATGGGAG | | TAGTCAGGAGAGG |
| | GGCAAATCATTTAAAACAT | | AGGAAAAATCTGG |
| | CAGAATGAGTATTTGGTTT | | CTAGTAAAACATG |
| | AGAGTTTGGCAACATATG | | TAAGGAAAATTTT |
| | CCCATATGCTGGCTGCCAT | | AGGGATGTTAAAG |
| | GAACAAAGGTTGGCTATA | | AAAAAAATAACAC |
| | AAGAGGTCATCAGTATATG | | AAAACAAAATATA |
| | AAACAGCCCCCTGCTGTC | | AAAAAAATCTAAC |
| | CATTCCTTATTCCATAGAA | | CTCAAGTCAAGGC |
| | AAGCCTTGACTTGAGGTT | | TTTTCTATGGAATA |
| | AGATTTTTTTTATATTTTGT | | AGGAATGGACAGC |
| | TTTGTGTTATTTTTTTCTTT | | AGGGGGCTGTTTC |
| | AACATCCCTAAAATTTTCC | | ATATACTGATGAC |
| | TTACATGTTTTACTAGCCA | | CTCTTTATAGCCA |
| | GATTTTTCCTCCTCTCCTG | | ACCTTTGTTCATG |
| | ACTACTCCCAGTCATAGCT | | GCAGCCAGCATAT |
| | GTCCCTCTTCTCTTATGGA | | GGGCATATGTTGC |
| | GATC (SEQ ID NO: 341) | | CAAACTCTAAACC |
| | | | AAATACTCATTCT |
| | | | GATGTTTTAAATG |
| | | | ATTTGCCCTCCCA |
| | | | TATGTCCTTCCGA |
| | | | GTGAGAGACACAA |
| | | | AAAATTCCAACAC |
| | | | ACTATTGCAATGA |
| | | | AAATAAATTTCCTT |
| | | | TATTAGCCAGAAG |
| | | | TCAGATGCTCAAG |
| | | | GGGCTTCATGATG |
| | | | TCCCCATAATTTTT |
| | | | GGCAGAGGGAAA |
| | | | AAGATCTCAGTGG |
| | | | TATTTGTGAGCCA |
| | | | GGGCATTGGCCAC |
| | | | ACCAGCCACCACC |
| | | | TTCTGATAGGCAG |
| | | | CCTGCACCTGAGG |
| | | | AGTGAACTATGGCC |
| | | | CTGACTGGAA |
| | | | (SEQ ID NO: 342) |
| THYMIDINE | GGGGGAGGCTAACTGAAA | TRANSPORT | ATCCTTCCAGTCAG |
| KINASE (TK) | CACGGAAGGAGACAATAC | OF RNA INTO | GGCCATGTTTGAGA |
| | CGGAAGGAACCCGCGCTA | CYTOPLASM; | GCTAGAAATAGCAA |
| | TGACGGCAATAAAAAGAC | ENHANCED | GTTTAAATAAGGCT |
| | AGAATAAAACGCACGGGT | RNA | AGTCCGTTATCAAC |
| | GTTGGGTCGTTTGTTCATA | STABILITY | TTGAAAAAGTGGG |
| | AACGCGGGGTTCGGTCCC | AND | ACCGAGTCGGTCCA |
| | AGGGCTGGCACTCTGTCG | EXPRESSION | CCTGAACCGTATATC |
| | ATACCCCACCGAGACCCC | OF ENCODED | CTATGGCAGGGCC |
| | ATTGGGGCCAATACGCCC | PROTEIN | TGCCGCCCCGACG |
| | GCGTTTCTTCCTTTTCCCC | | TTGGCTGCGAGCC |
| | ACCCCACCCCCCAAGTTC | | CTGGGCCTTCACC |
| | GGGTGAAGGCCCAGGGCT | | CGAACTTGGGGG |
| | CGCAGCCAACGTCGGGGC | | GTGGGGTGGGGA |
| | GGCAGGCCCTGCCATAG | | AAAGGAAGAAAC |
| | (SEQ ID NO: 343) | | GCGGGCGTATTGG |
| | | | CCCCAATGGGGTC |
| | | | TCGGTGGGGTATC |
| | | | GACAGAGTGCCA |
| | | | GCCCTGGGACCG |
| | | | AACCCCGCGTTTA |
| | | | TGAACAAACGACC |
| | | | CAACACCCGTGCG |
| | | | TTTTATTCTGTCTT |
| | | | TTTATTGCCGTCA |
| | | | TAGCGCGGGTTCC |
| | | | TTCCGGTATTGTC |
| | | | TCCTTCCGTGTTT |
| | | | CAGTTAGCCTCCC |
| | | | CCCTATGGCCCTGA |
| | | | CTGGAA |
| | | | (SEQ ID NO: 344) |
| MALAT1 ENE- | TAGGGTCATGAAGGTTTTT | RESULTS IN | ATCCTTCCAGTCAG |
| MASCRNA | CTTTTCCTGAGAAAACAA | RETENTION | GGCCATGTTTGAGA |
| | CACGTATTGTTTTCTCAGG | OF RNA IN | GCTAGAAATAGCAA |
| | TTTTGCTTTTTGGCCTTTT | NUCLEUS, | GTTTAAATAAGGCT |
| | TCTAGCTTAAAAAAAAAA | TRANSCRIPT | AGTCCGTTATCAAC |
| | AAAGCAAAAGATGCTGGT | TERMINATION | TTGAAAAAGTGGG |
| | GGTTGGCACTCCTGGTTT | AND | ACCGAGTCGGTCCA |
| | CCAGGACGGGGTTCAAAT | STABILIZATION | CCTGAACCGTATATC |
| | CCCTGCGGCGTCTTTGCTT | | AGTCAAAGCAAAG |
| | TGACT (SEQ ID NO: 345) | | ACGCCGCAGGGAT |
| | | | TTGAACCCCGTCC |
| | | | TGGAAACCAGGA |
| | | | GTGCCAACCACCA |
| | | | GCATCTTTTGCTT |
| | | | TTTTTTTTTTTAAG |
| | | | CTAGAAAAAGGCC |
| | | | AAAAAGCAAAACC |
| | | | TGAGAAAACAATA |
| | | | CGTGTTGTTTTCT |
| | | | CAGGAAAAGAAAA |
| | | | ACCTTCATGACCC |
| | | | TACTATGGCCCTGA |
| | | | CTGGAA |
| | | | (SEQ ID NO: 346) |
| KSHV | TGTTTTGGCTGGGTTTTTC | RESULTS IN | ATCCTTCCAGTCAG |
| PANENE | CTTGTTCGCACCGGACAC | RETENTION | GGCCATGTTTGAGA |
| | CTCCAGTGACCAGACGGC | OF RNA IN | GCTAGAAATAGCAA |
| | AAGGTTTTTATCCCAGTGT | NUCLEUS, | GTTTAAATAAGGCT |
| | ATATTGGAAAAACATGTTA | TRANSCRIPT | AGTCCGTTATCAAC |
| | TACTTTTGACAATTTAACG | TERMINATION | TTGAAAAAGTGGG |
| | TGCCTAGAGCTCAAATTA | AND | ACCGAGTCGGTCCA |
| | AACTAATACCATAACGTAA | STABILIZATION | CCTGAACCGTATATC |
| | TGCAACTTACAACATAAAT | | TTTTTTTTTTTTTT |
| | AAAGGTCAATGTTTAATCC | | TTTTTATGGATTAA |
| | ATAAAAAAAAAAAAAAA | | ACATTGACCTTTA |
| | AAAA (SEQ ID NO: 347) | | TTTATGTTGTAAG |
| | | | TTGCATTACGTTAT |
| | | | GGTATTAGTTTAAT |
| | | | TTGAGCTCTAGGC |
| | | | ACGTTAAATTGTC |
| | | | AAAAGTATAACAT |
| | | | GTTTTTCCAATATA |
| | | | CACTGGGATAAAA |
| | | | ACCTTGCCGTCTG |
| | | | GTCACTGGAGGTG |
| | | | TCCGGTGCGAACA |
| | | | AGGAAAAACCCAG |
| | | | CCAAAACACTATG |
| | | | GCCCTGACTGGAA |
| | | | (SEQ ID NO: 348) |
| THREE, | TGTTTTGGCTGGGTTTTTC | RESULTS IN | ATCCTTCCAGTCAG |
| SEQUENTIAL | CTTGTTCGCACCGGACAC | RETENTION | GGCCATGTTTGAGA |
| KSHV PANENES | CTCCAGTGACCAGACGGC | OF RNA IN | GCTAGAAATAGCAA |
| WITH | AAGGTTTTTATCCCAGTGT | NUCLEUS, | GTTTAAATAAGGCT |
| SHORT, | ATATTGGAAAAACATGTTA | TRANSCRIPT | AGTCCGTTATCAAC |
| UNCONSERVED | TACTTTTGACAATTTAACG | TERMINATION | TTGAAAAAGTGGG |
| RNA | TGCCTAGAGCTCAAATTA | AND | ACCGAGTCGGTCCA |
| LINKERS | AACTAATACCATAACGTAA | STABILIZATION, | CCTGAACCGTATATC |
| | TGCAACTTACAACATAAAT | PREDICTED | TTTTTTTTTTTTTT |
| | AAAGGTCAATGTTTAATCC | TO BE | TTTTTATGGATTAA |
| | ATAAAAAAAAAAAAAAA | GREATER | ACATTGACCTTTA |
| | AAAAACACACTGTTTTGG | THAN A | TTTATGTTGTAAG |
| | CTGGGTTTTTCCTTGTTCG | SINGLE PANENE | TTGCATTACGTTAT |
| | CACCGGACACCTCCAGTG | | GGTATTAGTTTAAT |
| | ACCAGACGGCAAGGTTTT | | TTGAGCTCTAGGC |
| | TATCCCAGTGTATATTGGA | | ACGTTAAATTGTC |
| | AAAACATGTTATACTTTTG | | AAAAGTATAACAT |
| | ACAATTTAACGTGCCTAG | | GTTTTTCCAATATA |
| | AGCTCAAATTAAACTAATA | | CACTGGGATAAAA |
| | CCATAACGTAATGCAACTT | | ACCTTGCCGTCTG |
| | ACAACATAAATAAAGGTC | | GTCACTGGAGGTG |
| | AATGTTTAATCCATAAAAA | | TCCGGTGCGAACA |
| | AAAAAAAAAAAAAATCTC | | AGGAAAAACCCAG |
| | TCTGTTTTGGCTGGGTTTT | | CCAAAACAGAGAG |
| | TCCTTGTTCGCACCGGAC | | ATTTTTTTTTTTTT |
| | ACCTCCAGTGACCAGACG | | TTTTTTATGGATTA |
| | GCAAGGTTTTTATCCCAGT | | AACATTGACCTTT |
| | GTATATTGGAAAAACATGT | | ATTTATGTTGTAAG |
| | TATACTTTTGACAATTTAA | | TTGCATTACGTTAT |
| | CGTGCCTAGAGCTCAAAT | | GGTATTAGTTTAAT |
| | TAAACTAATACCATAACGT | | TTGAGCTCTAGGC |
| | AATGCAACTTACAACATA | | ACGTTAAATTGTC |
| | AATAAAGGTCAATGTTTA | | AAAAGTATAACAT |
| | ATCCATAAAAAAAAAAAA | | GTTTTTCCAATATA |
| | AAAAAAA (SEQ ID NO: | | CACTGGGATAAAA |
| | 349) | | ACCTTGCCGTCTG |
| | | | GTCACTGGAGGTG |
| | | | TCCGGTGCGAACA |
| | | | AGGAAAAACCCAG |
| | | | CCAAAACAGTGTG |
| | | | TTTTTTTTTTTTTT |
| | | | TTTTTTATGGATTA |
| | | | AACATTGACCTTT |
| | | | ATTTATGTTGTAAG |
| | | | TTGCATTACGTTAT |
| | | | GGTATTAGTTTAAT |
| | | | TTGAGCTCTAGGC |
| | | | ACGTTAAATTGTC |
| | | | AAAAGTATAACAT |
| | | | GTTTTTCCAATATA |
| | | | CACTGGGATAAAA |
| | | | ACCTTGCCGTCTG |
| | | | GTCACTGGAGGTG |
| | | | TCCGGTGCGAACA |
| | | | AGGAAAAACCCAG |
| | | | CCAAAACACTATG |
| | | | GCCCTGACTGGAA |
| | | | (SEQ ID NO: 350) |
| SMBOX/U1 | CAGCAAGTTCAGAGAAAT | RESULTS IN | ATCCTTCCAGTCAG |
| SNRNA BOX | CTGAACTTGCTGGATTTTT | RETENTION | GGCCATGTTTGAGA |
| | GGAGCAGGGAGATGGAAT | OF RNA IN | GCTAGAAATAGCAA |
| | AGGAGCTTGCTCCGTCCA | NUCLEUS | GTTTAAATAAGGCT |
| | CTCCACGCATCGACCTGG | AND | AGTCCGTTATCAAC |
| | TATTGCAGTACCTCCAGG | TRANSCRIPT | TTGAAAAAGTGGG |
| | AACGGTGCACCCACTTTC | TERMINATION | ACCGAGTCGGTCCA |
| | TGGAGTTTCAAAAGTAGA | | CCTGAACCGTATATC |
| | CTGTACGCTAAGGGTCATA | | TTTAAGACGCCAA |
| | TCTTTTTTTGTTTGGTTTG | | CCAAGACACAAAC |
| | TGTCTTGGTTGGCGTCTTA | | CAAACAAAAAAAG |
| | AA (SEQ ID NO: 351) | | ATATGACCCTTAG |
| | | | CGTACAGTCTACT |
| | | | TTTGAAACTCCAG |
| | | | AAAGTGGGTGCAC |
| | | | CGTTCCTGGAGGT |
| | | | ACTGCAATACCAG |
| | | | GTCGATGCGTGGA |
| | | | GTGGACGGAGCA |
| | | | AGCTCCTATTCCA |
| | | | TCTCCCTGCTCCA |
| | | | AAAATCCAGCAAG |
| | | | TTCAGATTTCTCT |
| | | | GAACTTGCTGCTA |
| | | | TGGCCCTGACTGGA |
| | | | A |
| | | | (SEQ ID NO: 352) |
| U1 SNRNA 3′ | GTTTCAAAAGTAGACTGT | RESULTS IN | ATCCTTCCAGTCAG |
| BOX | ACGCTAAGGGTCATATCTT | RETENTION | GGCCATGTTTGAGA |
| | TTTTTGTTTGGTTTGTGTC | OF RNA IN | GCTAGAAATAGCAA |
| | TTGGTTGGCGTCTTAAA | NUCLEUS | GTTTAAATAAGGCT |
| | (SEQ ID NO: 353) | AND | AGTCCGTTATCAAC |
| | | TRANSCRIPT | TTGAAAAAGTGGG |
| | | TERMINATION | ACCGAGTCGGTCCA |
| | | | CCTGAACCGTATATC |
| | | | TTTAAGACGCCAA |
| | | | CCAAGACACAAAC |
| | | | CAAACAAAAAAAG |
| | | | ATATGACCCTTAG |
| | | | CGTACAGTCTACT |
| | | | TTTGAAACCTATGG |
| | | | CCCTGACTGGAA |
| | | | (SEQ ID NO: 354) |
| TRNA-LYSINE | GCCCGGCTAGCTCAGTCG | REPORTED | ATCCTTCCAGTCAG |
| | GTAGAGCATGAGACTCTT | TO ENABLE | GGCCATGTTTGAGA |
| | AATCTCAGGGTCGTGGGT | TRANSPORT | GCTAGAAATAGCAA |
| | TCGAGCCCCACGTIGGGC | OF RNA TO | GTTTAAATAAGGCT |
| | G (SEQ ID NO: 355) | MITOCHONDRIA | AGTCCGTTATCAAC |
| | | | TTGAAAAAGTGGG |
| | | | ACCGAGTCGGTCCA |
| | | | CCTGAACCGTATATC |
| | | | CGCCCAACGTGG |
| | | | GGCTCGAACCCAC |
| | | | GACCCTGAGATTA |
| | | | AGAGTCTCATGCT |
| | | | CTACCGACTGAGC |
| | | | TAGCCGGGCCTAT |
| | | | GGCCCTGACTGGAA |
| | | | (SEQ ID NO: 356) |
| BROCCOLI | GAGACGGTCGGGTCCAGA | VISUALIZATION | ATCCTTCCAGTCAG |
| APTAMER | TATTCGTATCTGTCGAGTA | (FLUORESCENCE) | GGCCATGTTTGAGA |
| | GAGTGTGGGCTC (SEQ ID | | GCTAGAAATAGCAA |
| | NO: 357) | | GTTTAAATAAGGCT |
| | | | AGTCCGTTATCAAC |
| | | | TTGAAAAAGTGGG |
| | | | ACCGAGTCGGTCCA |
| | | | CCTGAACCGTATATC |
| | | | GAGCCCACACTCT |
| | | | ACTCGACAGATAC |
| | | | GAATATCTGGACC |
| | | | CGACCGTCTCCTA |
| | | | TGGCCCTGACTGGA |
| | | | A |
| | | | (SEQ ID NO: 358) |
| SPINACH | GACGCAACTGAATGAAAT | VISUALIZATION | ATCCTTCCAGTCAG |
| APTAMER | GGTGAAGGACGGGTCCA | (FLUORESCENCE) | GGCCATGTTTGAGA |
| | GGTGTGGCTGCTTCGGCA | | GCTAGAAATAGCAA |
| | GTGCAGCTTGTTGAGTAG | | GTTTAAATAAGGCT |
| | AGTGTGAGCTCCGTAACT | | AGTCCGTTATCAAC |
| | AGTCGCGTC (SEQ ID NO: | | TTGAAAAAGTGGG |
| | 359) | | ACCGAGTCGGTCCA |
| | | | CCTGAACCGTATATC |
| | | | GACGCGACTAGTT |
| | | | ACGGAGCTCACAC |
| | | | TCTACTCAACAAG |
| | | | CTGCACTGCCGAA |
| | | | GCAGCCACACCTG |
| | | | GACCCGTCCTTCA |
| | | | CCATTTCATTCAG |
| | | | TTGCGTCCTATGGC |
| | | | CCTGACTGGAA |
| | | | (SEQ ID NO: 360) |
| SPINTACH2 | GATGTAACTGAATGAAAT | VISUALIZATION | ATCCTTCCAGTCAG |
| APTAMER | GGTGAAGGACGGGTCCA | (FLUORESCENCE) | GGCCATGTTTGAGA |
| | GTAGGCTGCTTCGGCAGC | | GCTAGAAATAGCAA |
| | CTACTTGTTGAGTAGAGT | | GTTTAAATAAGGCT |
| | GTGAGCTCCGTAACTAGT | | AGTCCGTTATCAAC |
| | TACATC (SEQ ID NO: 361) | | TTGAAAAAGTGGG |
| | | | ACCGAGTCGGTCCA |
| | | | CCTGAACCGTATATC |
| | | | GATGTAACTAGTT |
| | | | ACGGAGCTCACAC |
| | | | TCTACTCAACAAG |
| | | | TAGGCTGCCGAAG |
| | | | CAGCCTACTGGAC |
| | | | CCGTCCTTCACCA |
| | | | TTTCATTCAGTTA |
| | | | CATCCTATGGCCCT |
| | | | GACTGGAA |
| | | | (SEQ ID NO: 362) |
| MANGO | GGCACGTACGAAGGGACG | VISUALIZATION | ATCCTTCCAGTCAG |
| APTAMER | GTGCGGAGAGGAGAGTAC | (FLUORESCENCE) | GGCCATGTTTGAGA |
| | GTGC (SEQ ID NO: 363) | | GCTAGAAATAGCAA |
| | | | GTTTAAATAAGGCT |
| | | | AGTCCGTTATCAAC |
| | | | TTGAAAAAGTGGG |
| | | | ACCGAGTCGGTCCA |
| | | | CCTGAACCGTATATC |
| | | | GCACGTACTCTCC |
| | | | TCTCCGCACCGTC |
| | | | CCTTCGTACGTGC |
| | | | CCTATGGCCCTGAC |
| | | | TGGAA |
| | | | (SEQ ID NO: 364) |
| HDV | GGCCGGCATGGTCCCAGC | 3′ END RNA | ATCCTTCCAGTCAG |
| RIBOZYME | CTCCTCGCTGGCGCCGGC | PROCESSING | GGCCATGTTTGAGA |
| | TGGGCAACATGCTTCGGC | | GCTAGAAATAGCAA |
| | ATGGCGAATGGGAC (SEQ | | GTTTAAATAAGGCT |
| | ID NO: 365) | | AGTCCGTTATCAAC |
| | | | TTGAAAAAGTGGG |
| | | | ACCGAGTCGGTCCA |
| | | | CCTGAACCGTATATC |
| | | | GTCCCATTCGCCA |
| | | | TGCCGAAGCATGT |
| | | | TGCCCAGCCGGC |
| | | | GCCAGCGAGGAG |
| | | | GCTGGGACCATGC |
| | | | CGGCCCTATGGCCC |
| | | | TGACTGGAA |
| | | | (SEQ ID NO: 366) |
| N⁶- | GGACTCTAGGACTGGACT | TARGET FOR | ATCCTTCCAGTCAG |
| METHYL- | TTGGACT | METHYLATION | GGCCATGTTTGAGA |
| ADENOSINE | (SEQ ID NO: 367) | (UNDERLINED | GCTAGAAATAGCAA |
| MARKER | | A'S ARE | GTTTAAATAAGGCT |
| (M⁶A) | | METHYLATED). | AGTCCGTTATCAAC |
| | | M6A | TTGAAAAAGTGGG |
| | | METHYLATION | ACCGAGTCGGTCCA |
| | | CAN | CCTGAACCGTATATC |
| | | RESULT IN | AGTCCAAAGTCCA |
| | | ENHANCED | GTCCTAGAGTCCC |
| | | RNA | TATGGCCCTGACTG |
| | | STABILITY | GAA |
| | | AND | (SEQ ID NO: 368) |
| | | EXPRESSION, | |
| | | BUT IS NOT | |
| | | YET FULLY | |
| | | UNDERSTOOD | |

*each PEgRNA is shown in the 5′ to 3′ direction and has the following structural elements of FIG. 3F as designated by font type, as follows: 5′ - spacer sequence (normal font) - gRNA core (underlined sequence) - homology arm (italicized) - RT template (bolded font) - primer binding site (italicized) - 3′.

[0789] The PEgRNAs of the above table are designed to site-specifically insert examples of the above motifs into the HEXA gene (defective in Tay-Sachs disease) (e.g., GenBank No. KR710351.1 (SEQ ID NO: 369), however, this is only for purposes of illustration. The use of prime editing in RNA tagging is not limited to the HEXA gene and indeed may be any any. The HEXA mRNA has the following nucleotide sequence:

(SEQ ID NO: 369)
GTTCGTTGCAACAAATTGATGAGCAATGCTTTTTTATAATGCCAACTTTG
TACAAAAAAGTTGGCATGACAAGTTCCAGGCTTTGGTTTTCGCTGCTGCT
GGCGGCAGCGTTCGCAGGACGGGCGACGGCCCTCTGGCCCTGGCCTCAGA
ACTTCCAAACCTCCGACCAGCGCTACGTCCTTTACCCGAACAACTTTCAA
TTCCAGTACGATGTCAGCTCGGCCGCGCAGCCCGGCTGCTCAGTCCTCGA
CGAGGCCTTCCAGCGCTATCGTGACCTGCTTTTCGGTTCCGGGTCTTGGC
CCCGTCCTTACCTCACAGGGAAACGGCATACACTGGAGAAGAATGTGTTG
GTTGTCTCTGTAGTCACACCTGGATGTAACCAGCTTCCTACTTTGGAGTC
AGTGGAGAATTATACCCTGACCATAAATGATGACCAGTGTTTACTCCTCT
CTGAGACTGTCTGGGGAGCTCTCCGAGGTCTGGAGACTTTTAGCCAGCTT
GTTTGGAAATCTGCTGAGGGCACATTCTTTATCAACAAGACTGAGATTGA
GGACTTTCCCCGCTTTCCTCACCGGGGCTTGCTGTTGGATACATCTCGCC
ATTACCTGCCACTCTCTAGCATCCTGGACACTCTGGATGTCATGGCGTAC
AATAAATTGAACGTGTTCCACTGGCATCTGGTAGATGATCCTTCCTTCCC
ATATGAGAGCTTCACTTTTCCAGAGCTCATGAGAAAGGGGTCCTACAACC
CTGTCACCCACATCTACACAGCACAGGATGTGAAGGAGGTCATTGAATAC
GCACGGCTCCGGGGTATCCGTGTGCTTGCAGAGTTTGACACTCCTGGCCA
CACTTTGTCCTGGGGACCAGGTATCCCTGGATTACTGACTCCTTGCTACC
CTGGGTCTGAGCCCTCTGGCACCTTTGGACCAGTGAATCCCAGTCTCAAT
AATACCTATGAGTTCATGAGCACATTCTTCTTAGAAGTCAGCTCTGTCTT
CCCAGATTTTTATCTTCATCTTGGAGGAGATGAGGTTGATTTCACCTGCT
GGAAGTCCAACCCAGAGATCCAGGACTTTATGAGGAAGAAAGGCTTCGGT
GAGGACTTCAAGCAGCTGGAGTCCTTCTACATCCAGACGCTGCTGGACAT
CGTCTCTTCTTATGGCAAGGGCTATGTGGTGTGGCAGGAGGTGTTTGATA
ATAAAGTAAAGATTCAGCCAGACACAATCATACAGGTGTGGCGAGAGGAT
ATTCCAGTGAACTATATGAAGGAGCTGGAACTGGTCACCAAGGCCGGCTT
CCGGGCCCTTCTCTCTGCCCCCTGGTACCTGAACCGTATATCCTATGGCC
CTGACTGGAAGGATTTCTACGTAGTGGAACCCCTGGCATTTGAAGGTACC
CCTGAGCAGAAGGCTCTGGTGATTGGTGGAGAGGCTTGTATGTGGGGAGA
ATATGTGGACAACACAAACCTGGTCCCCAGGCTCTGGCCCAGAGCAGGGG
CTGTTGCCGAAAGGCTGTGGAGCAACAAGTTGACATCTGACCTGACATTT
GCCTATGAACGTTTGTCACACTTCCGCTGTGAGTTGCTGAGGCGAGGTGT
CCAGGCCCAACCCCTCAATGTAGGCTTCTGTGAGCAGGAGTTTGAACAGA
CCTGCCCAACTTTCTTGTACAAAGTTGGCATTATAAGAAAGCATTGCTTA
TCAATTTGTTGCAACGAAC.

[0790] The corresponding HEXA protein has the following amino acid sequence:

(SEQ ID NO: 370)
MTSSRLWFSLLLAAAFAGRATALWPWPQNFQTSDQRYVLYPNNFQFQYDV
SSAAQPGCSVLDEAFQRYRDLLFGSGSWPRPYLTGKRHTLEKNVLVVSVV
TPGCNQLPTLESVENYTLTINDDQCLLLSETVWGALRGLETFSQLVWKSA
EGTFFINKTEIEDFPRFPHRGLLLDTSRHYLPLSSILDTLDVMAYNKLNV
FHWHLVDDPSFPYESFTFPELMRKGSYNPVTHIYTAQDVKEVIEYARLRG
IRVLAEFDTPGHTLSWGPGIPGLLTPCYPGSEPSGTFGPVNPSLNNTYEF
MSTFFLEVSSVFPDFYLHLGGDEVDFTCWKSNPEIQDFMRKKGFGEDFKQ
LESFYIQTLLDIVSSYGKGYVVWQEVFDNKVKIQPDTIIQVWREDIPVNY
MKELELVTKAGFRALLSAPWYLNRISYGPDWKDFYVVEPLAFEGTPEQKA
LVIGGEACMWGEYVDNTNLVPRLWPRAGAVAERLWSNKLTSDLTFAYERL
SHFRCELLRRGVQAQPLNVGFCEQEFEQT.

[0791] Notably, the resulting RNA motifs would be included within the translated region of the HEXA gene, disrupting the function of the protein coding gene. Inserted polyadenylation motifs would result in premature transcript termination. This site is merely illustratrative of the potential PEgRNAs that could result in insertion of the listed RNA motifs of the above table within a genomic site that is transcribed and thus which would produce an RNA product.

[0792] PEgRNAs for use with PE for RNA tagging could be be expressed from a U6 promoter (in which case a single guanosine would be added to the 5′ end of the PEgRNA for guides that include proto spacers that do not begin with a G and 6-7 thymine would be added to the 3′ end) or a pol II promoter such as pCMV (in which case it might be necessary to remove the intrinsically transcribed sequence of this promoter from the 5′ end of the RNA via a self-cleaving element or Csy4 motif, and a termination motif would need to be added to the 3′ end of the RNA that does not result in export of the RNA from the nucleus, such as the 3′ box motif listed above. Note that this motif would not be inserted into the genome as a result of PE, as it would be 3′ of the annealing region). The core PEgRNA scaffold is underlined, the homology and annealing regions are italicized, and the inserted sequence is bolded. Note that the sequence inserted is the reverse complement of the above examples—as described below and therefore these PEgRNAs would need to be targeted to the coding strand.

[0793] Also, note that self-cleaving ribozymes other than HDV need in some embodiments to be tailored to the given target site; that is, while HDV cleaves the encoded transcript immediately 5′ to itself, the cut sites for all other self-cleaving ribozymes are within the ribozyme itself. Therefore, the first and last roughly 5-10 nucleotides (and in some instances potentially more than 10) would actually be a part of the encoded sequence. As an example, to cleave the sequence

(SEQ ID NO: 371)
5′NNNNNTCATCCTGATAAACTGCAAA-3′

after the 5 Ns, where N is any nucleotide, using a hammerhead self-cleaving ribozyme, the following sequence would be inserted, where the underlined sequences form an imperfect RNA pairing element.

(SEQ ID NO: 372)
5′NNNNNCAGTTTGTACGGATGACTGATGAGTCCCAAATAGGACGAAACG
CGCTTCGGTGCGTCTCATCCTGATAAACTGCAAA-3′.

[0794] There is significant flexibility in terms of the length and nature of this pairing element, and this would be true for any of the non-HDV self-cleaving ribozymes listed in the original submission. To install a hammerhead ribozyme to cleave the hexA mRNA using a PEgRNA with the same protospacer as the above listed constructs, the following PEgRNA sequence could be used (labels same as above):

5′ACCTGAACCGTATATCGACGCACCGAAGCGCGTTTCGTCCTATTTGG
GACTCATCAGGATATACGGTTCAGGTGATATACGGTTCAGGTGACGCAC
CGAAGCGCGTTTCGTCCTATTTGGGACTCATCAGACCTGAACCGTATAT
CATCCTTCCAGTCAGGGCCATGTTTGAGAGCTAGAAATAGCAAGTTTAA
ATAAGGCTAGTCCGTTATCAACTTGAAAAAGTGGGACCGAGTCGGTCCA
CCTGAACCGTATATCGACGCACCGAAGCGCGTTTCGTCCTATTTGGGAC
TCATCAGGATATACGGTTCAGGTCTATGGCCCTGACTGGAA-3'

(wherein the core PEgRNA scaffold is underlined, the homology and annealing regions are italicized, and the inserted sequence is bolded) (SEQ ID NO: 373).

[0795] Designing other PEgRNA for insertion of RNA motifs may follow the general principle described herein. However, it is noted that many of RNA motifs are potentially highly structured, which could make it difficult for them to be reverse-transcribed and inserted into the genome. Although for some RNA sequences, such as simple hairpins, both the RNA sequence itself and its complement are structured. However, that is unlikely to be true for the sequences noted above. Therefore, when inserting these motifs, it would most likely be best for the PEgRNA to encode the reverse complement of these sequences, resulting in the insertion of the DNA sequence actually encoding the motif into the genome. Similarly, inclusion of a self-cleaving ribozyme in the PEgRNA template region would result in processing and inefficient activity, while inclusion of its reverse complement would not. Thus, these PEgRNAs will likely have to target the coding strand, whereas PEgRNAs encoding other types of insertions (such as therapeutic correction) would be able to theoretically target either strand.

[0796] Also, note that for many of the inserted motifs, the resulting PEgRNA might not be able to be transcribed from the U6 promoter, necessitating use of other promoters, such as pCMV. Similarly, longer PEgRNAs could also be less stable. Shorter motifs, such as m⁶ A markers, would not have this challenge.

[0797] G. Use of Prime Editing for Generation of Sophisticated Gene Libraries

[0798] Prime editing may also be used to generate sophisticated libraries of protein- or RNA-coding genes with defined or variable insertions, deletions, or defined amino acid/nucleotide conversions, and their use in high-throughput screening and directed evolution is described herein. This application of prime editing can be further described in Example 7.

[0799] The generation of variable genetic libraries has most commonly been accomplished through mutagenic PCR (see Cadwell R C and Joyce G F. PCR Methods Appl. 1992). This method relies on either using reaction conditions that reduce the fidelity of DNA polymerase, or using modified DNA polymerases with higher mutation rates. As such, biases in these polymerases are reflected in the library product (e.g. a preference for transition mutations versus transversions). An inherent limitation of this approach to library construction is a relative inability to affect the size of the gene being varied. Most DNA polymerases have extremely low rates of indel mutations (insertions or deletions), and most of these will result in frameshift mutations in protein-coding regions, rendering members of the library unlikely to pass any downstream selection (See McInerney P, Adams P, and Hadi M Z. Mol Biol Int. 2014).

[0800] Additionally, biases in PCR and cloning can make it difficult to generate single libraries consisting of genes of different sizes. These limitations can severely limit the efficacy of directed evolution to enhance existing or engineer novel protein functions. In natural evolution, large changes in protein function or efficacy are typically associated with insertion and deletion mutations that are unlikely to occur during canonical library generation for mutagenesis. Furthermore, these mutations most commonly occur in regions of the protein in question that are predicted to form loops, as opposed to the hydrophobic core. Thus, most indels generated using a traditional unbiased approach are likely to either be deleterious or ineffective.

[0801] Libraries that could bias such mutations to the sites within the protein where they would be most likely to be beneficial, e.g., loop regions, would have a significant advantage over traditional libraries given that all libraries access only a fraction of the possible mutation space. Finally, although it is possible to generate genetic libraries with site-specific indel mutations through multistep PCR and clonal assembly using NNK primers or via DNA shuffling, these libraries cannot undergo additional rounds of ‘indelgenesis’ in continual evolution. Continuous evolution is a type of directed evolution with minimal user intervention. One such example is PACE (see Esvelt K M, Carlson J C, and Liu D R. Nature. 2011). Because continuous evolution occurs with minimal user intervention, any increase in library diversity during the evolution must occur using the native replication machinery. As such, although libraries of genes with inserted or removed codons as specific loci can be generated and screened in PACE, additional rounds of ‘indelgenesis’ are not possible.

[0802] It is envisioned that the programmability of prime editing (PE) can be leveraged to generate highly sophisticated, programmed genetic libraries for use in high-throughput screening and directed evolution (see FIG. 29A). PE can insert, change or remove defined numbers of nucleotides from specified genetic loci using information encoded in a prime editing guide RNA (PEgRNA) (see FIG. 29B). This enables the generation of targeted libraries with one or more amino acids inserted or removed from the loop regions wherein mutations are most likely to give rise to changes in function, without background introduction of nonfunctional frameshift mutations (see FIG. 29C). PE can be used to install specific sets of mutations without regard for biases inherent in either DNA polymerase or the sequence being mutated.

[0803] For instance, while converting a CCC codon to a stop codon would be an unlikely occurrence via canonical library generation because it would require three consecutive mutations, including two transversions, PE could be used to convert any given, targeted codon to a TGA stop codon in one step. They could also be used to install programmed diversity at given positions, for instance by incorporating codons encoding any hydrophobic amino acid at a given site, while not encoding any others. Furthermore, because of the programmability of PE, multiple PEgRNAs could be utilized to generate multiple different edits at multiple sites simultaneously, enabling the generation of highly programmed libraries (see FIG. 29D). Additionally, it is possible to use reverse transcriptases with lower fidelity to generate regions of mutagenesis within an otherwise invariable library (such as the HIV-I reverse transcriptase or Bordetella phage reverse transcriptase) (see Naorem S S, Hin J, Wang S, Lee W R, Heng X, Miller J F, Guo H. Proc Natl Acad Sci 2017 and Martinez M A, Vartanian J P, Wain-Hobson S. Proc Natl Acad Sci USA 1994).

[0804] The possibility of iterative rounds of PE on the same site is also envisioned, allowing—for instance—the repeated insertion of codons at a single site, e.g., in a loop region. Also, it is envisioned that all of the above described approaches can be incorporated into continual evolution, enabling the generation of novel in situ evolving libraries (see FIG. 30). They could also be used to construct these libraries within other cell types where it would otherwise be difficult to assemble large libraries, for instance within mammalian cells. Generation of PE-encoding bacterial strains that have been optimized for directed evolution would be a useful additional tool for the identification of proteins and RNAs with improved or novel functionality. All of these uses of PE are non-obvious due to the novel nature of PEs. In conclusion, library generation via PE would be a highly useful tool in synthetic biology and directed evolution, as well as for high-throughput screening of protein and RNA combinatorial mutants.

### Competing Approaches

[0805] The chief method by which diverse libraries are currently generated is by mutagenic PCR (see Cadwell R C and Joyce G F. PCR Methods Appl. 1992), described above. Insertions or deletions can be introduced via degenerated NNK primers at defined sites during PCR, although introducing such mutations at multiple sites requires multiple rounds of iterative PCR and cloning before constructing a more diverse library via mutagenic PCR, rendering the method slow. An alternative, complementary method is DNA shuffling, where fragments of a library of genes generated via DNase treatment are introduced into a PCR reaction without primers, resulting in the annealing of different fragments to each other and the rapid generation of more diverse libraries than via mutagenic PCR alone (see Meyer A J, Ellefson J W, Ellington A D. Curr Protoc Mol Biol. 2014). Although this approach can theoretically generate indel mutations, it more often results in frameshift mutations that destroy gene function. Furthermore, DNA shuffling requires a high degree of homology between gene fragments.

[0806] Both of these methods must be done in vitro, with the resulting library transformed into cells, while libraries generated by PE can be constructed in situ, enabling their use in continual evolution. While libraries can be constructed in situ through in vivo mutagenesis, these libraries rely on the host cellular machinery and exhibit biases against indels. Similarly, although traditional cloning methods can be used to generate site-specific mutational profiles, they cannot be used in situ and are generally assembled one at a time in vitro before being transformed into cells. The efficiency and broad functionality of PE in both prokaryotic and eukaryotic cell types further suggests that these libraries could be constructed directly in the cell type of interest, as opposed to being cloned into a model organism such as E. coli and then transferred into the cell or organism of interest. Another competing approach for targeted diversification is automated multiplex genome engineering, or MAGE, wherein multiple single-stranded DNA oligonucleotides can be incorporated within replication forks and result in programmable mutations. However, MAGE requires significant modification of the host strain and can lead to a 100-fold increase in off-target or background mutations (see Nyerges A et al. Proc Natl Acad Sci USA. 2016), whereas PE is more highly programmed and anticipated to result in fewer off-target effects. Additionally, MAGE has not been demonstrated in a wide variety of cell types, including mammalian cells.

[0807] By contrast, prime editing is a novel and non-obvious complementary technique for library generation.

### Use of PE for Constructing Gene Libraries

[0808] PE may be used to construct gene libraries in a programmable manner.

[0809] In one example, PE can be used in a directed evolution experiment to introduce protein variants into gene libraries during a continual evolution experiment using PACE, permitting iterative accumulation of both point mutations and indels in a manner not possible via traditional approaches.

[0810] It has already been shown that PE can site-specifically and programmably insert nucleotides into a genetic sequence in E. coli. Directed evolution can be used to identify monobodies with improved binding to a specific epitope via a modified two-hybrid protein:protein binding PACE selection. Specific and highly variable loops within these monobodies contribute significantly to affinity and specificity. Improved monobody binding might be obtained rapidly in PACE by varying the length and composition of these loops in a targeted fashion. However, varying sequence length is not an established functionality of PACE. While library of varied loop sizes might be used as a starting point for PACE, no subsequent improvements to length would arise throughout the PACE selection, barring access to beneficial synergistic combinations of point mutations and indel mutations.

[0811] In various embodiments, PE can be used to improve the PACE selection by enabling the in situ generation and evolution of monobodies with varying loop lengths. To do so, the PACE E. coli strain may be introduced to an additional PE plasmid, which encodes the PE enzyme and one or more PEgRNAs. Expression of PE enzyme and PEgRNAs in the E. coli would be under the control of a small molecule delivered to the PACE lagoon at a rate selected by the experimenter.

[0812] In various embodiments, the PEgRNA components would contain a spacer directing the PE to the site of interest on the selection phage and would be designed such that a multiple of three nucleotides could be inserted at the target site such that a new PEgRNA binding site would be introduced, enabling the iterative insertion of one or more codons at the targeted site.

[0813] In parallel, another host E. coli strain might include PEgRNAs that would template the removal of one or more codons, enabling loop size to shrink during the evolution. A PACE experiment might utilize a mixture of both strains or alternate the two to permit the slow and controlled addition or removal of loop sequences.

[0814] In addition to the use of PE and PACE to create monobody libraries, this technique can also be applied to the evolution of antibodies using PE and PACE. The binding principles governing antibodies are very similar to those governing monobodies: the length of antibody complement-determining region loops is critical to their binding function. Further, longer loop lengths have been found to be critical in the development of rare antibodies with broadly protective activity against HIV-1 and other viral infections (see Mascola J R, Haynes B F. Immunol Rev. 2013). Application of PE as described above to an antibody or antibody-derived molecule would permit the generation of antibodies with diverse loop length and varied loop sequence. In combination with PACE, such an approach would permit enhanced binding through loop geometries not accessible to standard PACE, and thus permit evolution of highly functional antibodies.

[0815] As a non-limiting example, the following PEgRNAs could be used to programmably modify the genome of a bacteriophage used in a continuous evolution experiment:

| MODIFI- | |
|---|---|
| CATION | PEGRNA SEQUENCE |
| CCA | UACACCAUCACGGUCUAUGCGUUUUAGAGCUAGAAAUAGC |
| INSERTION | AAGUUAAAAUAAGGCUAGUCCGUUAUCAACUUGAAAAAGU |
| | GGCACCGAGUCGGUGCUAUCUUCGCCCCAUGCAUAGACCG |
| | UGAUGG (SEQ ID NO: 101) |
| 1 NT | CGCGUCGCGCUCGUCAGAUCGUUUUAGAGCUAGAAAUAGC |
| DELETION | AAGUUAAAAUAAGGCUAGUCCGUUAUCAACUUGAAAAAGU |
| | GGCACCGAGUCGGUGCUUUCCGCCUACCUGCAUCUGACGA |
| | GCGCGA (SEQ ID NO: 102) |
| POINT | AUCGGAGAAUACAUGAACAUGUUUUAGAGCUAGAAAUAGC |
| MUTATION | AAGUUAAAAUAAGGCUAGUCCGUUAUCAACUUGAAAAAGU |
| | GGCACCGAGUCGGUGCCGGAGAAUACAUGAACAUCGGACC |
| | CGCGCUAUCUUC (SEQ ID NO: 103) |
| NNN | UACACCAUCACGGUCUAUGCGUUUUAGAGCUAGAAAUAGC |
| INSERTION | AAGUUAAAAUAAGGCUAGUCCGUUAUCAACUUGAAAAAGU |
| (N = | GGCACCGAGUCGGUGCUAUCUUCGCCNNNUGCAUAGACCG |
| A/T/G/C) | UGAUGG (SEQ ID NO: 104) |
| ITERATIVE | UACACCAUCACGGUCUAUGCGUUUUAGAGCUAGAAAUAGC |
| GGG | AAGUUAAAAUAAGGCUAGUCCGUUAUCAACUUGAAAAAGU |
| INSERTION | GGCACCGAGUCGGUGCGGGGGGGGGGGGGUGCAUAGACCG |
| | UGAUGG (SEQ ID NO: 105) |

[0816] In various embodiments, the use of PE for constructing gene libraries may make the use of the mutagenic activity of error-prone reverse transcriptases. The use of such mutagenic reverse transcriptase may facilitate the generation of mutagenized programmable libraries due to the lower fidelity of the error-prone RTs. As used herein, the term “error-prone” reverse transcriptase refers to a reverse transcriptase enzyme that occurs naturally or which has been derived from another reverse transcriptase (e.g., a wild type M-MLV reverse transcriptase) which has an error rate that is less than the error rate of wild type M-MLV reverse transcriptase. The error rate of wild type M-MLV reverse transcriptase is reported to be in the range of one error in 15,000 to 27,000 nucleobase incorporations. See Boutabout et al. (2001) “DNA synthesis fidelity by the reverse transcriptase of the yeast retrotransposon Ty1,” Nucleic Acids Res 29(11):2217-2222, which is incorporated herein by reference.

[0817] Thus, for purposes of this application, the term “error prone” refers to those RT that have an error rate that is greater than one error in 15,000 nucleobase incorporation (6.7×10⁻⁵ or higher), e.g., 1 error in 14,000 nucleobases (7.14×10⁻⁵ or higher), 1 error in 13,000 nucleobases or fewer (7.7×10⁻⁵ or higher), 1 error in 12,000 nucleobases or fewer (7.7×10⁻⁵ or higher), 1 error in 11,000 nucleobases or fewer (9.1×10⁻⁵ or higher), 1 error in 10,000 nucleobases or fewer (1×10⁻⁴ or 0.0001 or higher), 1 error in 9,000 nucleobases or fewer (0.00011 or higher), 1 error in 8,000 nucleobases or fewer (0.00013 or higher) 1 error in 7,000 nucleobases or fewer (0.00014 or higher), 1 error in 6,000 nucleobases or fewer (0.00016 or higher), 1 error in 5,000 nucleobases or fewer (0.0002 or higher), 1 error in 4,000 nucleobases or fewer (0.00025 or higher), 1 error in 3,000 nucleobases or fewer (0.00033 or higher), 1 error in 2,000 nucleobase or fewer (0.00050 or higher), or 1 error in 1,000 nucleobases or fewer (0.001 or higher), or 1 error in 500 nucleobases or fewer (0.002 or higher), or 1 error in 250 nucleobases or fewer (0.004 or higher).

[0818] A variety of mutagenic RTs could be envisioned for generation of highly mutagenized programmable libraries. Two such examples are the mutagenic reverse transcriptases from Bordetella phage (see Handa, S., et al. Nucl Acids Res 9711-25 (2018), which is incorporated herein by reference) and Legionella pneumophila (see Arambula, D., et al. Proc Natl Acad Sci USA 8212-7 (2013), which is incorporated by reference). In the case of the RT from Bordetella phage (brt), an accessory protein might need to also be added (bavd) to Cas9- or delivered in trans—as well as additional RNA sequences to the PEgRNA to improve binding of the mutagenic RT to the target site (see Handa, S., et al. Nucl Acids Res 9711-25 (2018)). When using mutagenic RTs, the template region of the PEgRNA might be enriched in adenosines or AAY codons to enhance diversity.

[0819] The amino acid sequence of the mutagenic RT from Bordetella phage is provided as follows. Like other RTs disclosed herein, the Brt protein may be fused to a napDNAbp as a fusion protein to form a functional PE.

| Name | Sequence |
|---|---|
| brt | MGKRHRNLIDQITTWENLLDAYRKTSHGKRRTWGYLEFKE |
| muta- | YDLANLLALQAELKAGNYERGPYREFLVYEPKPRLISALE |
| genic | FKDRLVQHALCNIVAPIFEAGLLPYTYACRPDKGTHAGVC |
| rt | HVQAELRRTRATHFLKSDFSKFFPSIDRAALYAMIDKKIH |
| | CAATRRLLRVVLPDEGVGIPIGSLTSQLFANVYGGAVDRL |
| | LHDELKQRHWARYMDDIVVLGDDPEELRAVFYRLRDFASE |
| | RLGLKISHWQVAPVSRGINFLGYRIWPTHKLLRKSSVKRA |
| | KRKVANFIKHGEDESLQRFLASWSGHAQWADTHNLFTWME |
| | EQYGIACH (SEQ ID NO: 129) |

[0820] In the case of Brt from Bodetella, the PE fusion may also include an additional accessory protein (Bavd). The accessory protein may be fused to the PE fusion protein or provided in trans. The amino acid sequence of Bavd accessory protein is provided as follows:

| Name | Sequence |
|---|---|
| bavd | MEPIEEATKCYDQMLIVERYERVISYLYPIAQSIPRKHGV |
| accessory | AREMFLKCLLGQVELFIVAGKSNQVSKLYAADAGLAMLRF |
| protein | WLRFLAGIQKPHAMTPHQVETAQVLIAEVGRILGSWIARV |
| to brt | NRKGQAGK (SEQ ID NO: 236) |

[0821] In the case of Brt from Bodetella, the PEgRNA may comprise an additional nucleotide sequence added a PEgRNA, e.g., to the 5′ or 3′ end. Examplary sequence is as follows, which is originally from the Bordetella phage genome:

| NAME | SEQUENCE |
|---|---|
| PEGRNA- | ACCUUCUUGCAUGGCUCUGCCAACGCUACGGCUUGGCGGGC |
| ADDI- | UGGCCUUUCCUCAAUAGGUGGUCAGCCGGUUCUGUCCUGCU |
| TION | UCGGCGAACACGUUACACGGUUCGGCAAAACGUCGAUUACU |
| 1 | GAAAAUGGAAAGGCGGGGCCGACUUCAAGGGCAGGCUGGGA |
| | AAUAA (SEQ ID NO: 237) |

[0822] This PEgRNA addition sequence can be reduced in various ways to shorten the length. For example, the PEgRNA-addition 1 sequence could be reduced to the following exemplary alternative addition sequences:

| NAME | SEQUENCE |
|---|---|
| PEGRNA- | ACCUUCUUGCAUGGCUCUGCCAACGCUACGGCUUGGCGGGC |
| ADDI- | UGGCCUUUCCUCAAUAGGUGGUCAGCCGGUUCUGUCCUGCU |
| TION | UCGGCGAACACGUUACACGGUUCGGCAAAACGUCGAUUACU |
| 2 | GAAAAUGGAAAGGCGGGGCCGACUUC |
| | (SEQ ID NO: 238) |
| PEGRNA- | ACCUUCUUGCAUGGCUCUGCCAACGCUACGGCUUGGCGGGC |
| ADDI- | UGGCCUUUCCUCAAUAGGUGGUCAAAGGGCAGGCUGGGAAA |
| TION | UAA |
| 3 | (SEQ ID NO: 239) |
| PEGRNA- | ACCUUCUUGCAUGGCUCUGCCAACGCUACGGCUUGGCGGGC |
| ADDI- | UGGCCUUUCCUCAAUAGGUGGUCA |
| TION | (SEQ ID NO: 277) |
| 4 | |
| PEGRNA- | CAUGGCUCUGCCAACGCUACGGCUUGGCGGGCUGGCCUUUC |
| ADDI- | CUCAAUAGGUGGUCAGCCGGUUCUGUCCUGCUUCGGCGAAC |
| TION | ACGUUACACGGUUCGGCAAAACGUCGAUUACUGAAAAUGGA |
| 5 | AAGGCGGGGCCGACUUCAAGGGCAGGCUGGGAAAUAA |
| | (SEQ ID NO: 240) |
| PEGRNA- | CAUGGCUCUGCCAACGCUACGGCUUGGCGGGCUGGCCUUUC |
| ADDI- | CUCAAUAGGUGGUCAGCCGGUUCUGUCCUGCUUCGGCGAAC |
| TION | ACGUUACACGGUUCGGCAAAACGUCGAUUACUGAAAAUGGA |
| 6 | AAGGCGGGGCCGACUUC |
| | (SEQ ID NO: 241) |
| PEGRNA- | CAUGGCUCUGCCAACGCUACGGCUUGGCGGGCUGGCCUUUC |
| ADDI- | CUCAAUAGGUGGUCAAAGGGCAGGCUGGGAAAUAA |
| TION | (SEQ ID NO: 242) |
| 7 | |
| PEGRNA- | CAUGGCUCUGCCAACGCUACGGCUUGGCGGGCUGGCCUUUC |
| ADDI- | CUCAAUAGGUGGUCA |
| TION | (SEQ ID NO: 243) |
| 8 | |

[0823] In other embodiments, the PEgRNA addition sequence can be also be mutated. For example, the PEgRNA-addition 1 sequence could be mutated to the following exemplary alternative addition sequence:

| NAME | SEQUENCE |
|---|---|
| PEGRNA- | ACCUUCUUGCAUGGCUCUGCCAACGCUACGGCUUGGCGGGC |
| ADDI- | UGGCCUUUCCUCAAUAGAUGAGCCGCCGGUUCUGUCCUGCU |
| TION | UCGGCGAACACGUUACACGGUUCGGCAAAACGUCGAUUACU |
| 1 | GAAAAUGGAAAGGCGGGGCCGACUUCAAGGGCAGGCUGGGA |
| MUTATED | AAUAA (SEQ ID NO: 244) |

[0824] In various embodiments relating to the use of PE for designing gene libraries, special PEgRNAs considerations may apply. For example, without wishing to be bound by theory, the additional PEgRNA sequences described above might be needed to enable efficient mutagenesis via mutagenic RTs. In another embodiment, iterative codon insertion using PE may required specific PEgRNA designs. For example, to insert a GGG (glycine) codon iteratively, the entire homology region of the PEgRNA might need to be composed of Gs, as shown above. This would mean that only certain sites could go iterative insertion. Additionally, the PAM sequence would not be able to be disrupted by the PE.

[0825] H. Use of Prime Editing for Insertion of Immunoepitopes

[0826] Prime editors may also be used as a means to insert known immunogenicity epitopes into endogenous or foreign genomic DNA, resulting in modification of the corresponding proteins for therapeutic or biotechnological applications (see FIGS. 31 and 32). Prior to the invention of prime editing, such insertions could be achieved only inefficiently and with high rates of indel formation from DSBs. prime editing solves the problem of high indel formation from insertion edits while generally offering higher efficiency than HDR. This lower rate of indel formation presents a major advantage of prime editing over HDR as a method for targeted DNA insertions, especially in the described application of inserting immunogenicity epitopes. The length of epitopes is in a range from few bases to hundreds of bases. Prime editor is an efficient approach to achieve such targeted insertions in mammalian cells.

[0827] The key concept of the invention is the use of prime editors to insert a nucleotide sequence containing previously described immunogenicity epitopes into endogenous or foreign genomic DNA for the downregulation and/or destruction of their protein products and/or expressing cell types. Nucleotide sequences for immunogenic epitope insertion would be targeted to genes in a manner to produce fusion proteins of the targeted gene's coded protein and the inserted immunogenic epitope's corresponding protein translation. Patient's immune systems will have been previously trained to recognize these epitopes as a result of standard prior immunization from routine vaccination against, for example, tetanus or diphtheria or measles. As a result of the immunogenic nature of the fused epitopes, patient's immune systems would be expected to recognize and disable the prime edited protein (not just the inserted epitope) and potentially the cells from which it was expressed.

[0828] Precise genome targeting technologies using the CRISPR/Cas system have recently been explored in a wide range of applications, including the insertion of engineered DNA sequences into targeted genomic loci. Previously, homology-directed repair (HDR) has been used for this application, requiring an ssDNA donor template and repair initiation by means of a double-stranded DNA break (DSB). This strategy offers the broadest range of possible changes to be made in cells and is the only method available to insert large DNA sequences into mammalian cells. However, HDR is hampered by undesired cellular side effects stemming from its initiating DSB, such as high levels of indel formation, DNA translocations, large deletions, and P53 activation. In addition to these drawbacks, HDR is limited by low efficiency in many cell types (T cells are a notable exception to this observation). Recent efforts to overcome these drawbacks include fusing human Rad51 mutants to a Cas9 D10A nickase (RDN), resulting in a DSB-free HDR system that features improved HDR product:indel ratios and lower off target editing, but is still hampered by cell-type dependencies and only modest HDR editing efficiency.

[0829] Recently developed fusions of Cas9 to reverse transcriptases (“Prime editors”) coupled with PEgRNAs represent a novel genome editing technology that offers a number of advantages over existing genome editing methods, including the ability to install any single nucleotide substitution, and to insert or delete any short stretch of nucleotides (up to at least several dozen bases) in a site-specific manner. Notably, PE edits are achieved with generally low rates of unintended indels. As such, PE enables targeted insertion-based editing applications that have been previously impossible or impractical.

[0830] This particular aspect describes a method for using prime editing as a means to insert known immunogenicity epitopes into endogenous or foreign genomic DNA, resulting in modification of the corresponding proteins for therapeutic or biotechnological applications (see FIGS. 31 and 32). Prior to the invention of prime editing, such insertions could be achieved only inefficiently and with high rates of indel formation from DSBs. prime editing solves the problem of high indel formation from insertion edits while generally offering higher efficiency than HDR. This lower rate of indel formation presents a major advantage of prime editing over HDR as a method for targeted DNA insertions, especially in the described application of inserting immunogenicity epitopes. The length of epitopes is in a range from few bases to hundreds of bases. Prime editor is the most efficient and cleanest technology to achieve such targeted insertions in mammalian cells.

[0831] The key concept of this aspect is the use of prime editors to insert a nucleotide sequence containing previously described immunogenicity epitopes into endogenous or foreign genomic DNA for the downregulation and/or destruction of their protein products and/or expressing cell types. Nucleotide sequences for immunogenic epitope insertion would be targeted to genes in a manner to produce fusion proteins of the targeted gene's coded protein and the inserted immunogenic epitope's corresponding protein translation. Patient's immune systems will have been previously trained to recognize these epitopes as a result of standard prior immunization from routine vaccination against, for example, tetanus or diphtheria or measles. As a result of the immunogenic nature of the fused epitopes, patient's immune systems would be expected to recognize and disable the prime edited protein (not just the inserted epitope) and potentially the cells from which it was expressed.

[0832] Fusions to targeted genes would be engineered as needed to ensure the inserted epitope protein translation is exposed for immune system recognition. This could include targeted nucleotide insertions resulting in protein translations yielding C-terminal fusions of immunogenicity epitopes to targeted genes, N-terminal fusions of immunogenicity epitopes to targeted genes, or the insertion of nucleotides into genes so that immunogenicity epitopes are coded within surfaced-exposed regions of protein structure.

[0833] Protein linkers encoded as nucleotides inserted between the target gene sequence and the inserted immunogenicity epitope nucleotide sequence may need to be engineered as part of this invention to facilitate immune system recognition, cellular trafficking, protein function, or protein folding of the targeted gene. These inserted nucleotide-encoded protein linkers may include (but are not limited to) variable lengths and sequences of the XTEN linker or variable lengths and sequences of Glycine-Serine linkers. These engineered linkers have been previous used to successfully facilitate protein fusions. Examplary linkers may include any of those described herein, including the amino acid sequence (GGGGS)ₙ (SEQ ID NO: 165), (G)ₙ (SEQ ID NO: 166), (EAAAK)ₙ (SEQ ID NO: 167), (GGS)ₙ (SEQ ID NO: 168), (SGGS)ₙ (SEQ ID NO: 169), (XP)ₙ (SEQ ID NO: 170), or any combination thereof, wherein n is independently an integer between 1 and 30, and wherein X is any amino acid. In some embodiments, the linker comprises the amino acid sequence (GGS)ₙ (SEQ ID NO: 176), wherein n is 1, 3, or 7. In some embodiments, the linker comprises the amino acid sequence SGSETPGTSESATPES (SEQ ID NO: 171). In some embodiments, the linker comprises the amino acid sequence SGGSSGGSSGSETPGTSESATPESSGGSSGGS (SEQ ID NO: 172). In some embodiments, the linker comprises the amino acid sequence SGGSGGSGGS (SEQ ID NO: 173). In some embodiments, the linker comprises the amino acid sequence SGGS (SEQ ID NO: 174).

[0834] Distinguishing features of this aspect include the ability to use previously acquired immune responses to specific amino acid sequences as a means to induce an immune response against otherwise non-immunogenic proteins. Another distinguishing feature is the ability to insert the nucleotide sequences of these immunogenic epitopes in a targets manner that does not induce high levels of unwanted indels as a by-product editing and is efficient in its insertion. This specific application of PE has the ability to combine cell type-specific delivery methods (such as AAV serotypes) to insert epitopes in cell types that are of interest to trigger an immune response to.

[0835] Prime editing as a means of inserting immunogenic epitopes into pathogenic genes could be used to program the patient's immune system to fight a wide variety of diseases (not limited to cancer as with immuno-oncology strategies). An immediately relevant use of this technology would be as a cancer therapeutic as it could undermine a tumor's immune escape mechanism by causing an immune response to a relevant oncogene like HER2 or growth factors like EGFR. Such an approach could seem similar to T-cell engineering, but one novel advance of this approach is that it can be utilized in many cell types and for diseases beyond cancer, without needed to generate and introduce engineered T-cells into patients.

[0836] Using PE to insert an immunogenicity epitope which most people are already vaccinated against (tetanus, pertussis, diphtheria, measles, mumps, rubella, etc.) into a foreign or endogenous gene that drives a disease, so the patient's immune system learns to disable that protein.

[0837] Diseases that stand to have a potential therapeutic benefit from the aforementioned strategy include those caused by aggregation of toxic proteins, such as in fatal familial insomnia. Other diseases that could benefit include those caused by pathogenic overexpression of an otherwise nontoxic endogenous protein, and those caused by foreign pathogens.

[0838] Primary therapeutic indications include those mentioned above such as therapeutics for cancer, prion and other neurodegenerative diseases, infectious diseases, and preventative medicine. Secondary therapeutic indications may include preventative care for patients with late-onset genetic diseases. It is expected that current standard of care medicines may be used in conjunction with prime editing for some diseases, like particularly aggressive cancers, or in cases where medications help alleviate disease symptoms until the disease completely cured. Below are examples of immunoepitopes that may be inserted into genes by the herein disclosed prime editors:

| | | EPITOPE AMINO | EXAMPLE NUCLEIC ACID |
|---|---|---|---|
| VACCINE | DISEASE | ACID SEQUENCE | SEQUENCE (8) |
| 1 | TETANUS | QYIKANSKFIGITEL | CATGATATAAAAGCAAATTCTAAATTTA |
| | TOXOID | (SEQ ID NO: 396) | TAGGTATAACTGAACTA (SEQ ID NO: |
| | | | 397) |
| 2 | DIPHTHERIA | GADDVVDSSKSF | GGCGCCGACGACGTGGTGGACAGCAG |
| | TOXIN | VMENFSSYHGTK | CAAGAGCTTCGTGATGGAGAACTTCA |
| | MUTANT | PGYVDSIQKGIQK | GCAGCTACCACGGCACCAAGCCCGGC |
| | CRM197 | PKSGTQGNYDDD | TACGTGGACAGCATCCAGAAGGGCAT |
| | | WKEFYSTDNKYD | CCAGAAGCCCAAGAGCGGCACCCAGG |
| | | AAGYSVDNENPL | GCAACTACGACGACGACTGGAAGGAG |
| | | SGKAGGVVKVTY | TTCTACAGCACCGACAACAAGTACGA |
| | | PGLTKVLALKVD | CGCCGCCGGCTACAGCGTGGACAACG |
| | | NAETIKKELGLSL | AGAACCCCCTGAGCGGCAAGGCCGGC |
| | | TEPLMEQVGTEEF | GGCGTGGTGAAGGTGACCTACCCCGG |
| | | IKRFGDGASRVVL | CCTGACCAAGGTGCTGGCCCTGAAGG |
| | | SLPFAEGSSSVEYI | TGGACAACGCCGAGACCATCAAGAAG |
| | | NNWEQAKALSVE | GAGCTGGGCCTGAGCCTGACCGAGCC |
| | | LEINFETRGKRGQ | CCTGATGGAGCAGGTGGGCACCGAGG |
| | | DAMYEYMAQAC | AGTTCATCAAGAGGTTCGGCGACGGC |
| | | AGNRVRRSVGSSL | GCCAGCAGGGTGGTGCTGAGCCTGCC |
| | | SCINLDWDVIRDK | CTTCGCCGAGGGCAGCAGCAGCGTGG |
| | | TKTKIESLKEHGPI | AGTACATCAACAACTGGGAGCAGGCC |
| | | KNKMSESPNKTV | AAGGCCCTGAGCGTGGAGCTGGAGAT |
| | | SEEKAKQYLEEFH | CAACTTCGAGACCAGGGGCAAGAGGG |
| | | QTALEHPELSELK | GCCAGGACGCCATGTACGAGTACATGG |
| | | TVTGTNPVFAGA | CCCAGGCCTGCGCCGGCAACAGGGTG |
| | | NYAAWAVNVAQV | AGGAGGAGCGTGGGCAGCAGCCTGAG |
| | | IDSETADNLEKTT | CTGCATCAACCTGGACTGGGACGTGAT |
| | | AALSILPGIGSVM | CAGGGACAAGACCAAGACCAAGATCG |
| | | GIADGAVHHNTEE | AGAGCCTGAAGGAGCACGGCCCCATC |
| | | IVAQSIALSSLMVA | AAGAACAAGATGAGCGAGAGCCCCAA |
| | | QAIPLVGELVDIGF | CAAGACCGTGAGCGAGGAGAAGGCC |
| | | AAYNFVESIINLFQ | AAGCAGTACCTGGAGGAGTTCCACCA |
| | | VVHNSYNRPAYSP | GACCGCCCTGGAGCACCCCGAGCTGA |
| | | GHKTQPFLHDGY | GCGAGCTGAAGACCGTGACCGGCACC |
| | | AVSWNTVEDSIIR | AACCCCGTGTTCGCCGGCGCCAACTA |
| | | TGFQGESGHDIKI | CGCCGCCTGGGCCGTGAACGTGGCCC |
| | | TAENTPLPIAGVL | AGGTGATCGACAGCGAGACCGCCGAC |
| | | LPTIPGKLDVNKS | AACCTGGAGAAGACCACCGCCGCCCT |
| | | KTHISVNGRKIRM | GAGCATCCTGCCCGGCATCGGCAGCGT |
| | | RCRAIDGDVTFCR | GATGGGCATCGCCGACGGCGCCGTGC |
| | | PKSPVYVGNGVH | ACCACAACACCGAGGAGATCGTGGCC |
| | | ANLHVAFHRSSSE | CAGAGCATCGCCCTGAGCAGCCTGAT |
| | | KIHSNEISSDSIGV | GGTGGCCCAGGCCATCCCCCTGGTGG |
| | | LGYQKTVDHTKV | GCGAGCTGGTGGACATCGGCTTCGCC |
| | | NSKLSLFFEIKS | GCCTACAACTTCGTGGAGAGCATCATC |
| | | (SEQ ID NO: 398) | AACCTGTTCCAGGTGGTGCACAACAG |
| | | | CTACAACAGGCCCGCCTACAGCCCCG |
| | | | GCCACAAGACCCAGCCCTTCCTGCAC |
| | | | GACGGCTACGCCGTGAGCTGGAACAC |
| | | | CGTGGAGGACAGCATCATCAGGACCG |
| | | | GCTTCCAGGGCGAGAGCGGCCACGAC |
| | | | ATCAAGATCACCGCCGAGAACACCCC |
| | | | CCTGCCCATCGCCGGCGTGCTGCTGCC |
| | | | CACCATCCCCGGCAAGCTGGACGTGA |
| | | | ACAAGAGCAAGACCCACATCAGCGTG |
| | | | AACGGCAGGAAGATCAGGATGAGGTG |
| | | | CAGGGCCATCGACGGCGACGTGACCT |
| | | | TCTGCAGGCCCAAGAGCCCCGTGTAC |
| | | | GTGGGCAACGGCGTGCACGCCAACCT |
| | | | GCACGTGGCCTTCCACAGGAGCAGCA |
| | | | GCGAGAAGATCCACAGCAACGAGATC |
| | | | AGCAGCGACAGCATCGGCGTGCTGGG |
| | | | CTACCAGAAGACCGTGGACCACACCA |
| | | | AGGTGAACAGCAAGCTGAGCCTGTTC |
| | | | TTCGAGATCAAGAGC (SEQ ID NO: 399) |
| 3 | MUMPS | GTYRLIPNARANL | GGCACCTACAGGCTGATCCCCAACGC |
| | IMMUNO- | TA (SEQ ID NO: | CAGGGCCAACCTGACCGCC (SEQ ID |
| | EPITOPE 1 | 400) | NO: 401) |
| 4 | MUMPS | PSKFFTISDSATFA | CCGAGCAAATTTTTTACCATTAGCGAT |
| | IMMUNO- | PGPVSNA (SEQ ID | AGCGCGACCTTTGCGCCGGGCCCGGT |
| | EPITOPE 2 | NO: 402) | GAGCAACGCG (SEQ ID NO: 403) |
| | MUMPS | PSKLFIMLDNATF | CCGAGCAAACTGTTTATTATGCTGGAT |
| | IMMUNO- | APGPVVNA (SEQ | AACGCGACCTTTGCGCCGGGCCCGGT |
| | EPITOPE 1 | ID NO: 404) | GGTGAACGCG (SEQ ID NO: 405) |
| | | | SELECTED EXAMPLES FROM |
| | | | HEMAGGLUTININ-NEURAMINIDASE |
| | | | (HN) DIVERSITY AMONG OUTBREAK |
| | | | STRAINS (TABLE 1) DIVERGENCE |
| | | | BETWEEN VACCINE STRAIN JL5 AND |
| | | | OUTBREAK STRAINS (TABLE 2) |
| 5 | RUBELLA | TPPPYQVSCGGES | ACCCCCCCCCCCTACCAGGTGAGCTGC |
| | VIRUS | DRASARVIDPAAQS | GGCGGCGAGAGCGACAGGGCCAGCG |
| | (RV) | (SEQ ID NO: 406) | CCAGGGTGATCGACCCCGCCGCCCAG |
| | | | AGC (SEQ ID NO: 407) |
| 6 | HEMAG- | PEYAYKIVKNKK | CCCGAGTACGCCTACAAGATCGTGAA |
| | GLUTININ | MEDGFLQGMVD | GAACAAGAAGATGGAGGACGGCTTCC |
| | | GWYGHHSNEQGS | TGCAGGGCATGGTGGACGGCTGGTAC |
| | | GLMENERTLDKA | GGCCACCACAGCAACGAGCAGGGCAG |
| | | NPNNDLCSWSDH | CGGCCTGATGGAGAACGAGAGGACCC |
| | | EASSNNTNQEDLL | TGGACAAGGCCAACCCCAACAACGAC |
| | | QRESRRKKRIGTS | CTGTGCAGCTGGAGCGACCACGAGGC |
| | | TLNQRGNCNTKC | CAGCAGCAACAACACCAACCAGGAGG |
| | | QTEEARLKREEVS | ACCTGCTGCAGAGGGAGAGCAGGAGG |
| | | LVKSDQCSNGSLQ | AAGAAGAGGATCGGCACCAGCACCCT |
| | | CRANNSTEQVD | GAACCAGAGGGGCAACTGCAACACCA |
| | | (SEQ ID NO: 408) | AGTGCCAGACCGAGGAGGCCAGGCTG |
| | | | AAGAGGGAGGAGGTGAGCCTGGTGA |
| | | | AGAGCGACCAGTGCAGCAACGGCAGC |
| | | | CTGCAGTGCAGGGCCAACAACAGCAC |
| | | | CGAGCAGGTGGAC (SEQ ID NO: 409) |
| 7 | NEURAMINI- | TKSTNSRSGGISG | ACCAAGAGCACCAACAGCAGGAGCG |
| | DASE | PDNEAPVGEAPSP | GCGGCATCAGCGGCCCCGACAACGAG |
| | | YGDNPRPNDGNN | GCCCCCGTGGGCGAGGCCCCCAGCCC |
| | | IRIGSKGYNGIITD | CTACGGCGACAACCCCAGGCCCAACG |
| | | TIEESCSCYPDAK | ACGGCAACAACATCAGGATCGGCAGC |
| | | VVKSVELDSTIWT | AAGGGCTACAACGGCATCATCACCGA |
| | | SGSSPNQKIITIGW | CACCATCGAGGAGAGCTGCAGCTGCT |
| | | DPNGWTGTPMSP | ACCCCGACGCCAAGGTGGTGAAGAGC |
| | | NGAYGTDGPSNG | GTGGAGCTGGACAGCACCATCTGGAC |
| | | QANQHQAESISA | CAGCGGCAGCAGCCCCAACCAGAAGA |
| | | GNSSLCPIRDNWH | TCATCACCATCGGCTGGGACCCCAACG |
| | | GSNRSWSWPDGAE | GCTGGACCGGCACCCCCATGAGCCCC |
| | | (SEQ ID NO: 410) | AACGGCGCCTACGGCACCGACGGCCC |
| | | | CAGCAACGGCCAGGCCAACCAGCACC |
| | | | AGGCCGAGAGCATCAGCGCCGGCAAC |
| | | | AGCAGCCTGTGCCCCATCAGGGACAA |
| | | | CTGGCACGGCAGCAACAGGAGCTGGA |
| | | | GCTGGCCCGACGGCGCCGAG (SEQ ID |
| | | | NO: 411) |
| 8 | TAP1 | EKIVLLLAMMEKI | GAGAAGATCGTGCTGCTGCTGGCCATG |
| | (TRANS- | VLLLAKCQTPMG | ATGGAGAAGATCGTGCTGCTGCTGGCC |
| | PORT | AIKAVDGVTNKCP | AAGTGCCAGACCCCCATGGGCGCCAT |
| | ANTIGEN | YLGSPSF (SEQ ID | CAAGGCCGTGGACGGCGTGACCAACA |
| | PRESENTA- | NO: 412) | AGTGCCCCTACCTGGGCAGCCCCAGC |
| | TION) ON | | TTC (SEQ ID NO: 413) |
| | H5N1 | | |
| | VIRUS | | |
| | HEMAG- | | |
| | GLUTININ | | |
| 9 | TAP2 | IRPCFWVELNPNQ | ATCAGGCCCTGCTTCTGGGTGGAGCTG |
| | (TRANS- | KIITIRPCFWVELI | AACCCCAACCAGAAGATCATCACCATC |
| | PORT | CYPDAGEIT (SEQ | AGGCCCTGCTTCTGGGTGGAGCTGATC |
| | ANTIGEN | ID NO: 414) | TGCTACCCCGACGCCGGCGAGATCACC |
| | PRESENTA- | | (SEQ ID NO: 415) |
| | TION) ON | | |
| | H5N1 | | |
| | VIRUS | | |
| | NEURAMINI- | | |
| | DASE | | |
| 10 | HEMAG- | MEKIVLLLAEKIV | ATGGAGAAGATCGTGCTGCTGCTGGCC |
| | GLUTININ | LLLAMCPYLGSPS | GAGAAGATCGTGCTGCTGCTGGCCATG |
| | EPITOPES | FKCQTPMGAIKAV | TGCCCCTACCTGGGCAGCCCCAGCTTC |
| | TOWARD | DGVTNK (SEQ ID | AAGTGCCAGACCCCCATGGGCGCCAT |
| | CLASS I | NO: 416) | CAAGGCCGTGGACGGCGTGACCAACA |
| | HLA | | AG (SEQ ID NO: 417) |
| 11 | NEURAMINI- | NPNQKIITICYPDAG | AACCCCAACCAGAAGATCATCACCATCT |
| | DASE | EITIRPCFWVELRPC | GCTACCCCGACGCCGGCGAGATCACCAT |
| | EPITOPES | FWVELI (SEQ ID | CAGGCCCTGCTTCTGGGTGGAGCTGAG |
| | TOWARD | NO: 418) | GCCCTGCTTCTGGGTGGAGCTGATC |
| | CLASS I | | (SEQ ID NO: 419) |
| | HLA | | |
| 12 | HEMAG- | MVSLVKSDQIGTST | ATGGTGAGCCTGGTGAAGAGCGACCAG |
| | GLUTININ | LNQR (SEQ ID NO: | ATCGGCACCAGCACCCTGAACCAGAGG |
| | EPITOPES | 420) | (SEQ ID NO: 421) |
| | TOWARD | | |
| | CLASS II | | |
| | HLA | | |
| 13 | NEURAMINI- | YNGIITDTI (SEQ ID | TACAACGGCATCATCACCGACACCATC |
| | DASE | NO: 422) | (SEQ ID NO: 423) |
| | EPITOPES | | |
| | TOWARD | | |
| | CLASS II | | |
| | HLA | | |
| 14 | HEMAG- | MEKIVLLLAEKIVL | ATGGAGAAGATCGTGCTGCTGCTGGCC |
| | GLUTININ | LLAMMVSLVKSDQ | GAGAAGATCGTGCTGCTGCTGGCCATG |
| | EPITOPE | CPYLGSPSFIGTSTL | ATGGTGAGCCTGGTGAAGAGCGACCAG |
| | H5N1- | NQRKCQTPMGAIK | TGCCCCTACCTGGGCAGCCCCAGCTTC |
| | BOUND | AVDGVTNK (SEQ | ATCGGCACCAGCACCCTGAACCAGAGG |
| | CLASS I | ID NO: 424) | (SEQ ID NO: 425) |
| | AND | | |
| | CLASS II | | |
| | HLA | | |
| 15 | NEURAMINI- | NPNQKIITIYNGIIT | AACCCCAACCAGAAGATCATCACCATCT |
| | DASE | DTICYPDAGEITIRP | ACAACGGCATCATCACCGACACCATCTG |
| | EPITOPE | CFWVELRPCFWVELI | CTACCCCGACGCCGGCGAGATCACCATC |
| | H5N1- | (SEQ ID NO: 426) | AGGCCCTGCTTCTGGGTGGAGCTGAGG |
| | BOUND | | CCCTGCTTCTGGGTGGAGCTGATC |
| | CLASS I | | (SEQ ID NO: 427) |
| | AND | | |
| | CLASS II | | |
| | HLA | | |

[0839] Additional immunoepitopes may also be installed which are known in the art. Any of the immunoepitopes available from the Immune Epitope Database and Analysis Resource (iedb.org/epitopedetails_v3.php) (the contents of which are incorporated herein by reference) may be installed by the prime editors disclosed herein.

[0840] In some embodiments, the immunoepitopes which may be installed by the prime editors disclosed herein may include any of the following epitopes:

| | | | SEQ | |
|---|---|---|---|---|
| NO. | DISEASE | EPITOPE AMINO ACID SEQUENCE | ID NO | ACCESS. NO. |
| 1 | TETANUS | QYIKANSKFIGITEL | 396 | NA |
| | TOXOID | | | |
| 2 | DIPHTHERIA | GADDVVDSSKSFVMENFSSYHGTKP | 428 | NA |
| | TOXIN MUTANT | GYVDSIQKGIQKPKSGTQGNYDDDW | | |
| | CRM197 | KEFYSTDNKYDAAGYSVDNENPLSG | | |
| | | KAGGVVKVTYPGLTKVLALKVDNA | | |
| | | ETIKKELGLSLTEPLMEQVGTEEFIKR | | |
| | | FGDGASRVVLSLPFAEGSSSVEYINN | | |
| | | WEQAKALSVELEINFETRGKRGQDA | | |
| | | MYEYMAQACAGNRVRRSVGSSLSCI | | |
| | | NLDWDVIRDKTKTKIESLKEHGPIKN | | |
| | | KMSESPNKTVSEEKAKQYLEEFHQT | | |
| | | ALEHPELSELKTVTGTNPVFAGANYA | | |
| | | AWAVNVAQVIDSETADNLEKTTAALS | | |
| | | ILPGIGSVMGIADGAVHHNTEEIVAQS | | |
| | | IALSSLMVAQAIPLVGELVDIGFAAYN | | |
| | | FVESIINLFQVVHNSYNRPAYSPGHKT | | |
| | | QPFLHDGYAVSWNTVEDSIIRTGFQG | | |
| | | ESGHDIKITAENTPLPIAGVLLPTIPGK | | |
| | | LDVNKSKTHISVNGRKIRMRCRAIDG | | |
| | | DVTFCRPKSPVYVGNGVHANLHVAF | | |
| | | HRSSSEKIHSNEISSDSIGVLGYQKTV | | |
| | | DHTKVNSKLSLFFEIKS | | |
| 3 | MUMPS | GTYRLIPNARANLTA | 400 | NA |
| 4 | MUMPS | PSKFFTISDSATFAPGPVSNA; | 402; 404 | NA |
| | | PSKLFIMLDNATFAPGPVVNA | | |
| 5 | RUBELLA VIRUS | TPPPYQVSCGGESDRASARVIDPAAQS | 406 | NA |
| | (RV) | | | |
| 6 | HEMAGGLUTININ | PEYAYKIVKNKKMEDGFLQGMVDG | 408 | NA |
| | | WYGHHSNEQGSGLMENERTLDKAN | | |
| | | PNNDLCSWSDHEASSNNTNQEDLLQ | | |
| | | RESRRKKRIGTSTLNQRGNCNTKCQT | | |
| | | EEARLKREEVSLVKSDQCSNGSLQCR | | |
| | | ANNSTEQVD | | |
| 7 | NEURAMINIDASE | TKSTNSRSGGISGPDNEAPVGEAPSP | 410 | NA |
| | | YGDNPRPNDGNNIRIGSKGYNGIITD | | |
| | | TIEESCSCYPDAKVVKSVELDSTIWTS | | |
| | | GSSPNQKIITIGWDPNGWTGTPMSPN | | |
| | | GAYGTDGPSNGQANQHQAESISAGN | | |
| | | SSLCPIRDNWHGSNRSWSWPDGAE | | |
| 8 | TAP (TRANSPORT | EKIVLLLAMMEKIVLLLAKCQTPMG | 412 | NA |
| | ANTIGEN | AIKAVDGVTNKCPYLGSPSF | | |
| | PRESENTATION) | | | |
| | ON H5N1 VIRUS | | | |
| | HEMAGGLUTININ | | | |
| 9 | TAP (TRANSPORT | IRPCFWVELNPNQKIITIRPCFWVELIC | 414 | NA |
| | ANTIGEN | YPDAGEIT | | |
| | PRESENTATION) | | | |
| | ON H5N1 VIRUS | | | |
| | NEURAMINIDASE | | | |
| 10 | HEMAGGLUTININ | MEKIVLLLAEKIVLLLAMCPYLGSPS | 416 | NA |
| | EPITOPES | FKCQTPMGAIKAVDGVTNK | | |
| | TOWARD CLASS I | | | |
| | HLA | | | |
| 11 | NEURAMINIDASE | NPNQKIITICYPDAGEITIRPCFWVELR | 418 | NA |
| | EPITOPES | PCFWVELI | | |
| | TOWARD CLASS I | | | |
| | HLA | | | |
| 12 | HEMAGGLUTININ | MVSLVKSDQIGTSTLNQR | 420 | NA |
| | EPITOPES | | | |
| | TOWARD CLASS | | | |
| | II HLA | | | |
| 13 | NEURAMINIDASE | YNGIITDTI | 422 | NA |
| | EPITOPES | | | |
| | TOWARD CLASS | | | |
| | II HLA | | | |
| 14 | HEMAGGLUTININ | MEKIVLLLAEKIVLLLAMMVSLVKSD | 424 | NA |
| | EPITOPE H5N1- | QCPYLGSPSFIGTSTLNQRKCQTPMG | | |
| | BOUND CLASS I | AIKAVDGVTNK | | |
| | AND CLASS II | | | |
| | HLA | | | |
| 15 | NEURAMINIDASE | NPNQKIITIYNGIITDTICYPDAGEITIR | 426 | NA |
| | EPITOPE H5N1- | PCFWVELRPCFWVELI | | |
| | BOUND CLASS I | | | |
| | AND CLASS II | | | |
| | HLA | | | |
| 16 | CORYNEBACTERIUM | AACAGNRVRRSVGSSLKC | 899 | SRC280292 |
| | DIPHTHERIAE | | | |
| 17 | MEASLES VIRUS | AADHCPVVEVNGVTI | 900 | P69353.1 |
| | STRAIN | | | |
| | EDMONSTON | | | |
| 18 | MEASLES VIRUS | AAHLPTGTPLDID | 901 | P04851.1 |
| | STRAIN | | | |
| | EDMONSTON | | | |
| 19 | BORDETELLA | AALAVWAGLAVQ | 902 | Q00879.1 |
| | PERTUSSIS | | | |
| 20 | MEASLES VIRUS | AALGVATAAQITAGI | 903 | P69353.1 |
| | STRAIN | | | |
| | EDMONSTON | | | |
| 21 | RUBELLA VIRUS | AALLNTPPPYQVSCGGESDRATAR | 904 | P07566.1 |
| | STRAIN THERIEN | | | |
| 22 | RUBELLA VIRUS | AAQSFTGVVYGTHTT | 905 | BAA28178.1 |
| 23 | RUBELLA VIRUS | ACEVEPAFGHSDAAC | 906 | BAA28178.1 |
| 24 | RUBELLA VIRUS | ACTFWAVNAYSSGGY | 907 | BAA28178.1 |
| 25 | RUBELLA VIRUS | ADDPLLR | 908 | BAA19893.1 |
| 26 | RUBELLA VIRUS | ADDPLLRT | 909 | CAJ88851.1 |
| 27 | MEASLES VIRUS | AEMICDIDTYIVEAG | 910 | P04851.1 |
| | STRAIN | | | |
| | EDMONSTON | | | |
| 28 | MEASLES VIRUS | AEMICDIDTYIVEAGLASFI | 911 | P04851.1 |
| | STRAIN | | | |
| | EDMONSTON | | | |
| 29 | MEASLES VIRUS | AEPLLSC | 912 | P04851.1 |
| | STRAIN | | | |
| | EDMONSTON | | | |
| 30 | BORDETELLA | AFVSTSSSRRYTEVY | 913 | CAD44970.1 |
| | PERTUSSIS | | | |
| 31 | BORDETELLA | AGFIYRETFCITTIYKTGQPAADHYYS | 914 | P04979.1 |
| | PERTUSSIS | KVTA | | |
| 32 | RUBELLA VIRUS | AGLLACCAKCLYYLR | 915 | BAA28178.1 |
| 33 | RUBELLA VIRUS | AHTTSDPWHPPG | 916 | BAA19893.1 |
| 34 | MEASLES VIRUS | AIAKLEDAKELLESS | 917 | P69353.1 |
| | STRAIN | | | |
| | EDMONSTON | | | |
| 35 | MEASLES VIRUS | AIDNLRASLETTNQA | 918 | P69353.1 |
| | STRAIN | | | |
| | EDMONSTON | | | |
| 36 | BORDETELLA | AKGVEFR | 919 | ACI16088.1 |
| | PERTUSSIS | | | |
| 37 | MEASLES VIRUS | AKWAVPTTRTDDKLR | 920 | P08362.1 |
| | STRAIN | | | |
| | EDMONSTON | | | |
| 38 | MEASLES VIRUS | ALAEVLKKPV | 921 | ABO69699.1 |
| | STRAIN | | | |
| | EDMONSTON | | | |
| 39 | MEASLES VIRUS | ALGVINTLEWIPRFK | 922 | P08362.1 |
| | STRAIN | | | |
| | EDMONSTON | | | |
| 40 | MEASLES VIRUS | ALHQSMLNSQAIDNL | 923 | P69353.1 |
| | STRAIN | | | |
| | EDMONSTON | | | |
| 41 | MEASLES VIRUS | ALIGILSLFV | 924 | ABI54110.1 |
| | STRAIN | | | |
| | EDMONSTON | | | |
| 42 | RUBELLA VIRUS | ALLNTPPPYQVSCGGESDRA | 925 | CAJ88851.1 |
| 43 | RUBELLA VIRUS | ALLNTPPPYQVSCGGESDRASARV | 926 | CAJ88851.1 |
| | STRAIN M33 | | | |
| 44 | RUBELLA VIRUS | ALVEGLAPGGGNCHL | 927 | BAA28178.1 |
| 45 | BORDETELLA | AMAAWSERAGEA | 928 | P04977.1 |
| | PERTUSSIS | | | |
| 46 | MEASLES VIRUS | ANCASILCKCYTTGT | 929 | P69353.1 |
| | STRAIN | | | |
| | EDMONSTON | | | |
| 47 | BORDETELLA | ANPNPYTSRRSV | 930 | P04977.1 |
| | PERTUSSIS | | | |
| 48 | RUBELLA VIRUS | APGPGEVW | 931 | CAJ88851.1 |
| 49 | RUBELLA VIRUS | APLPPHTTERIETRSARHPWRIR | 932 | ABD64214.1 |
| 50 | RUBELLA VIRUS | APPMPPQPPRAHGQHYGHHHHQLPF | 933 | CAA33016.1 |
| | VACCINE STRAIN | LG | | |
| | RA27/3 | | | |
| 51 | RUBELLA VIRUS | APPTLPQPPCAHGQHYGHHHHQLPF | 934 | P07566.1 |
| | STRAIN THERIEN | LG | | |
| 52 | RUBELLA VIRUS | APPTLPQPPRAHGQHYGHHHHQLPF | 935 | ABD64214.1 |
| | | LG | | |
| 53 | BORDETELLA | APQPGPQPPQPPQPQPEAPAPQ | 936 | P14283.3 |
| | PERTUSSIS | | | |
| 54 | RUBELLA VIRUS | AQLASYFNPGGSYYK | 937 | BAA28178.1 |
| 55 | MEASLES VIRUS | ARAAHLPTGTPLD | 938 | P04851.1 |
| | STRAIN | | | |
| | EDMONSTON | | | |
| 56 | MEASLES VIRUS | ARLVSEIAMHTTEDK | 939 | P04851.1 |
| | STRAIN | | | |
| | EDMONSTON | | | |
| 57 | MEASLES VIRUS | ARLVSEIAMHTTEDKISRAV | 940 | P04851.1 |
| | STRAIN | | | |
| | EDMONSTON | | | |
| 58 | MEASLES VIRUS | ASDVETAEGGEIHELLR | 941 | P03422.1 |
| | STRAIN | | | |
| | EDMONSTON-B | | | |
| 59 | MEASLES | ASDVETAEGGEIHELLRLQ | 942 | ABO69699.1 |
| | MORBILLIVIRUS | | | |
| 60 | MEASLES VIRUS | ASDVETAEGGEIHELLRLQSR | 943 | P03422.1 |
| | STRAIN | | | |
| | EDMONSTON-B | | | |
| 61 | MEASLES | ASDVETAEGGEIHKLLRLQ | 944 | AAA63285.1 |
| | MORBILLIVIRUS | | | |
| 62 | RUBELLA VIRUS | ASDVLPGHWLQG | 945 | NP_740663.1 |
| | STRAIN M33 | | | |
| 63 | MEASLES VIRUS | ASELGITAEDARLVS | 946 | P04851.1 |
| | STRAIN | | | |
| | EDMONSTON | | | |
| 64 | MEASLES VIRUS | ASELGITAEDARLVSEIAMH | 947 | P04851.1 |
| | STRAIN | | | |
| | EDMONSTON | | | |
| 65 | MEASLES VIRUS | ASESSQDPQDSRR | 948 | P04851.1 |
| | STRAIN | | | |
| | EDMONSTON | | | |
| 66 | MEASLES VIRUS | ASILCKCYTTGTIIN | 949 | P69353.1 |
| | STRAIN | | | |
| | EDMONSTON | | | |
| 67 | RUBELLA VIRUS | ASPVCQRHSPDCSRL | 950 | BAA28178.1 |
| 68 | BORDETELLA | ASQARWTGATRA | 951 | BAF35031.1 |
| | PERTUSSIS | | | |
| 69 | RUBELLA VIRUS | ASYFNPGGSYYKQYHPTACEVEPAFG | 952 | P07566.1 |
| | STRAIN THERIEN | HS | | |
| 70 | MEASLES VIRUS | ASYKVMTRSSHQSLV | 953 | P69353.1 |
| | STRAIN | | | |
| | EDMONSTON | | | |
| 71 | BORDETELLA | ASYVKKPKEDVD | 954 | ACI16088.1 |
| | PERTUSSIS | | | |
| 72 | MEASLES VIRUS | ATAAQITAGIALHQS | 955 | P69353.1 |
| | STRAIN | | | |
| | EDMONSTON | | | |
| 73 | RUBELLA VIRUS | ATPERPRL | 956 | CAJ88851.1 |
| 74 | MEASLES VIRUS | AVCLGGLIGIPALIC | 957 | P69353.1 |
| | STRAIN | | | |
| | EDMONSTON | | | |
| 75 | MEASLES VIRUS | AVGPRQAQVSF | 958 | P04851.1 |
| | STRAIN | | | |
| | EDMONSTON | | | |
| 76 | RUBELLA VIRUS | AVNAYSSGGYAQLAS | 959 | BAA28178.1 |
| 77 | RUBELLA VIRUS | AVSETRQTWAEWAAA | 960 | BAA28178.1 |
| 78 | MEASLES VIRUS | AVTAPDTAADSELRR | 961 | P04851.1 |
| | STRAIN | | | |
| | EDMONSTON | | | |
| 79 | MEASLES VIRUS | AVTAPDTAADSELRRWIKYT | 962 | P04851.1 |
| | STRAIN | | | |
| | EDMONSTON | | | |
| 80 | BORDETELLA | AYGGIIKDAPPGAGFIYRETFC | 963 | P04979.1 |
| | PERTUSSIS | | | |
| 81 | RUBELLA VIRUS | CALPLAGLLACCAKC | 964 | BAA28178.1 |
| 82 | RUBELLA VIRUS | CARIWNGTQRACTFW | 965 | BAA28178.1 |
| 83 | MEASLES VIRUS | CARTLVSGSFGNRFI | 966 | P69353.1 |
| | STRAIN | | | |
| | EDMONSTON | | | |
| 84 | BORDETELLA | CASPYEGRYRDMYDALRBRLLY | 967 | SRC280066 |
| | PERTUSSIS | | | |
| 85 | BORDETELLA | CAVFVRSGQPVIGA | 968 | AAA83981.1 |
| | PERTUSSIS | | | |
| 86 | RUBELLA VIRUS | CCAKCLYYLRGAIAPR | 969 | BAA28178.1 |
| 87 | MEASLES VIRUS | CCRGRCNKKGEQVGM | 970 | P69353.1 |
| | STRAIN | | | |
| | EDMONSTON | | | |
| 88 | RUBELLA VIRUS | CEIPTDVSCEGLGAW | 971 | BAA28178.1 |
| 89 | BORDETELLA | CFGKDLKRPGSSPMEV | 972 | P0A3R5.1 |
| | PERTUSSIS | | | |
| 90 | MEASLES | CFQQACKGKIQALCE | 973 | P06830.1 |
| | MORBILLIVIRUS | | | |
| 91 | MEASLES | CFQQACKGKIQALCENPEWAPLKDN | 974 | AAR89413.1 |
| | MORBILLIVIRUS | RIPS | | |
| 92 | RUBELLA VIRUS | CGGESDRASARVIDP | 975 | BAA28178.1 |
| 93 | BORDETELLA | CITTIYKTGQPAADHYYSKVTA | 976 | P04979.1 |
| | PERTUSSIS | | | |
| 94 | MEASLES | CKGKIQALCENPEWA | 977 | AAR89413.1 |
| | MORBILLIVIRUS | | | |
| 95 | MEASLES VIRUS | CKPWQESRKNKAQ | 978 | P04851.1 |
| | STRAIN | | | |
| | EDMONSTON | | | |
| 96 | MEASLES VIRUS | CNKKGEQVGMSRPGL | 979 | P69353.1 |
| | STRAIN | | | |
| | EDMONSTON | | | |
| 97 | RUBELLA VIRUS | CNVTTEHPFCNTPHG | 980 | BAA28178.1 |
| 98 | BORDETELLA | CQVGSSNSAF | 981 | P04977.1 |
| | PERTUSSIS | | | |
| 99 | MEASLES | CSGPTTIRGQFS | 982 | P08362.1 |
| | MORBILLIVIRUS | | | |
| 100 | BORDETELLA | CTSPYDGKYWSMYSRL | 983 | AAA83981.1 |
| | PERTUSSIS | | | |
| 101 | MEASLES VIRUS | CVLADSESGGHITHS | 984 | P08362.1 |
| | STRAIN | | | |
| | EDMONSTON | | | |
| 102 | MEASLES | CYTTGTIINQDPDKILTYIAADHC | 985 | AAF02706.1 |
| | MORBILLIVIRUS | | | |
| 103 | RUBELLA VIRUS | DADDPLLR | 986 | CAJ88851.1 |
| 104 | MEASLES VIRUS | DARAAHLPTGTPLDI | 987 | P04851.1 |
| | STRAIN | | | |
| | EDMONSTON | | | |
| 105 | MEASLES VIRUS | DARAAHLPTGTPLDIDTASE | 988 | P04851.1 |
| | STRAIN | | | |
| | EDMONSTON | | | |
| 106 | MEASLES VIRUS | DCHAPTYLPAEVDGD | 989 | P08362.1 |
| | STRAIN | | | |
| | EDMONSTON | | | |
| 107 | RUBELLA VIRUS | DCSRLVGATPERPRL | 990 | BAA28178.1 |
| 108 | MEASLES VIRUS | DDKLRMETCFQQACK | 991 | P08362.1 |
| | STRAIN | | | |
| | EDMONSTON | | | |
| 109 | RUBELLA VIRUS | DDPLLRTA | 992 | CAJ88851.1 |
| 110 | RUBELLA VIRUS | DDPLLRTAPGPGEVW | 993 | BAA28178.1 |
| 111 | BORDETELLA | DDPPATVYRYD | 994 | P04977.1 |
| | PERTUSSIS | | | |
| 112 | BORDETELLA | DDPPATVYRYDSRPPED | 995 | CAD44970.1 |
| | PERTUSSIS | | | |
| 113 | BORDETELLA | DDPPATVYRYDSRPPEDV | 996 | ACI04548.1 |
| | PERTUSSIS | | | |
| 114 | MEASLES | DEVGLRTPQRFTDLV | 997 | P06830.1 |
| | MORBILLIVIRUS | | | |
| 115 | MEASLES VIRUS | DHCPVVEVNGVTIQV | 998 | P69353.1 |
| | STRAIN | | | |
| | EDMONSTON | | | |
| 116 | MEASLES VIRUS | DIDTASESSQDPQ | 999 | P04851.1 |
| | STRAIN | | | |
| | EDMONSTON | | | |
| 117 | MEASLES VIRUS | DINKVLEKLGYSGGD | 1000 | P69353.1 |
| | STRAIN | | | |
| | EDMONSTON | | | |
| 118 | BORDETELLA | DLIAYKQ | 1001 | ACI16088.1 |
| | PERTUSSIS | | | |
| 119 | MEASLES VIRUS | DLIGQKLGLKLLRYY | 1002 | P69353.1 |
| | STRAIN | | | |
| | EDMONSTON | | | |
| 120 | RUBELLA VIRUS | DLQKALEAQSRALRAELAA | 1003 | P07566.1 |
| 121 | MEASLES | DLQYVLATYDTSRVE | 1004 | P06830.1 |
| | MORBILLIVIRUS | | | |
| 122 | MEASLES VIRUS | DLSLRRFMV | 1005 | P04851.1 |
| | STRAIN | | | |
| | EDMONSTON | | | |
| 123 | MEASLES VIRUS | DLSNCMVALGELKLA | 1006 | P08362.1 |
| | STRAIN | | | |
| | EDMONSTON | | | |
| 124 | RUBELLA VIRUS | DLVEYIMNYTGNQQSRWGLGSPNC | 1007 | CAJ88851.1 |
| 125 | MEASLES | DLVKFISDKIKFLNP | 1008 | AAR89413.1 |
| | MORBILLIVIRUS | | | |
| 126 | MEASLES | DLVKFISTKIKFLNP | 1009 | SRC280117 |
| | MORBILLIVIRUS | | | |
| 127 | MEASLES VIRUS | DLYKSNHNNV | 1010 | P08362.1 |
| | STRAIN | | | |
| | EDMONSTON | | | |
| 128 | BORDETELLA | DNVLDHLTGR | 1011 | ACI04548.1 |
| | PERTUSSIS | | | |
| 129 | BORDETELLA | DNVLDHLTGRSC | 1012 | P04977.1 |
| | PERTUSSIS | | | |
| 130 | BORDETELLA | DNVLDHLTGRSCQ | 1013 | P04977.1 |
| | PERTUSSIS | | | |
| 131 | MEASLES | DPDKILTYIAA | 1014 | AAF02706.1 |
| | MORBILLIVIRUS | | | |
| 132 | RUBELLA VIRUS | DPGDLVEYIMNYTGNQQSR | 1015 | P07566.1 |
| | STRAIN THERIEN | | | |
| 133 | RUBELLA VIRUS | DPLLRTAP | 1016 | CAJ88851.1 |
| 134 | RUBELLA VIRUS | DPLLRTAPGPGEVWVTPVIGSQ | 1017 | CAJ88851.1 |
| 135 | MEASLES VIRUS | DPQDSRRSAEPLL | 1018 | P04851.1 |
| | STRAIN | | | |
| | EDMONSTON | | | |
| 136 | MEASLES VIRUS | DPVIDRLYLSSHRGV | 1019 | P08362.1 |
| | STRAIN | | | |
| | EDMONSTON | | | |
| 137 | MEASLES VIRUS | DQILRSMKGLSSTSI | 1020 | P69353.1 |
| | STRAIN | | | |
| | EDMONSTON | | | |
| 138 | MEASLES | DQYCADVAAEELMNA | 1021 | P06830.1 |
| | MORBILLIVIRUS | | | |
| 139 | MEASLES VIRUS | DSESGGHITH | 1022 | P08362.1 |
| | STRAIN | | | |
| | EDMONSTON | | | |
| 140 | MEASLES VIRUS | DTASESSQDPQDS | 1023 | P04851.1 |
| | STRAIN | | | |
| | EDMONSTON | | | |
| 141 | RUBELLA VIRUS | DTVMSVFALASYVQH | 1024 | BAA28178.1 |
| 142 | BORDETELLA | DVFQNGFTAWGNND | 1025 | P04977.1 |
| | PERTUSSIS | | | |
| 143 | RUBELLA VIRUS | DVGAVPPGKFVTAAL | 1026 | BAA28178.1 |
| 144 | CORYNEBACTERIUM | DVNKSKTHISVNGRKI | 1027 | CAE11230.1 |
| | DIPHTHERIAE | | | |
| 145 | RUBELLA VIRUS | DVSCEGLGAWVPAAP | 1028 | BAA28178.1 |
| 146 | RUBELLA VIRUS | DWASPVCQRHSPDCSRLVGATPERPRL | 1029 | P07566.1 |
| | STRAIN THERIEN | | | |
| 147 | MEASLES VIRUS | EARESYRETGPSR | 1030 | P04851.1 |
| | STRAIN | | | |
| | EDMONSTON | | | |
| 148 | BORDETELLA | EAVEAERAGRGTG | 1031 | ACI04548.1 |
| | PERTUSSIS | | | |
| 149 | MEASLES VIRUS | EDAKELLESSDQILR | 1032 | P69353.1 |
| | STRAIN | | | |
| | EDMONSTON | | | |
| 150 | MEASLES VIRUS | EDRRVKQSRGEAR | 1033 | P04851.1 |
| | STRAIN | | | |
| | EDMONSTON | | | |
| 151 | MEASLES VIRUS | EDSITIPYQGSGKGV | 1034 | P08362.1 |
| | STRAIN | | | |
| | EDMONSTON | | | |
| 152 | RUBELLA VIRUS | EEAFTYLCTAPGCAT | 1035 | BAA28178.1 |
| 153 | MEASLES VIRUS | EGFNMILGTILAQIW | 1036 | P04851.1 |
| | STRAIN | | | |
| | EDMONSTON | | | |
| 154 | MEASLES VIRUS | EGFNMILGTILAQIWVLLAK | 1037 | P04851.1 |
| | STRAIN | | | |
| | EDMONSTON | | | |
| 155 | RUBELLA VIRUS | EHPFCNTPHGQLEVQ | 1038 | BAA28178.1 |
| 156 | MEASLES VIRUS | EISDIEVQDPEGFNM | 1039 | P04851.1 |
| | STRAIN | | | |
| | EDMONSTON | | | |
| 157 | MEASLES VIRUS | EISDIEVQDPEGFNMILGTI | 1040 | P04851.1 |
| | STRAIN | | | |
| | EDMONSTON | | | |
| 158 | MEASLES VIRUS | EKPNLSSKRSE | 1041 | P08362.1 |
| | STRAIN | | | |
| | EDMONSTON | | | |
| 159 | MEASLES VIRUS | ELKLAALCHGEDSIT | 1042 | P08362.1 |
| | STRAIN | | | |
| | EDMONSTON | | | |
| 160 | MEASLES | ELMNALVNSTLLETR | 1043 | P06830.1 |
| | MORBILLIVIRUS | | | |
| 161 | MEASLES VIRUS | ELPRL | 1044 | P04851.1 |
| | STRAIN | | | |
| | EDMONSTON | | | |
| 162 | MEASLES | ENPEWAPLKDNRIPSYGVLSVDL | 1045 | AAR89413.1 |
| | MORBILLIVIRUS | | | |
| 163 | MEASLES VIRUS | EPIRDALNAMTQNIR | 1046 | P69353.1 |
| | STRAIN | | | |
| | EDMONSTON | | | |
| 164 | MEASLES VIRUS | EQVGMSRPGLKPDLT | 1047 | P69353.1 |
| | STRAIN | | | |
| | EDMONSTON | | | |
| 165 | RUBELLA VIRUS | ERPRLRLV | 1048 | CAJ88851.1 |
| 166 | RUBELLA VIRUS | ERPRLRLVDADDPLL | 1049 | BAA28178.1 |
| 167 | MEASLES VIRUS | ESPGQLIQRITDDPDVS | 1050 | P04851.1 |
| | CAM/RB | | | |
| 168 | MEASLES VIRUS | ESRGIKARITHVDTE | 1051 | P69353.1 |
| | STRAIN | | | |
| | EDMONSTON | | | |
| 169 | MEASLES VIRUS | ESSCTFMPEGTVCSQ | 1052 | P69353.1 |
| | STRAIN | | | |
| | EDMONSTON | | | |
| 170 | MEASLES VIRUS | ESSQDPQDSRRSA | 1053 | P04851.1 |
| | STRAIN | | | |
| | EDMONSTON | | | |
| 171 | MEASLES VIRUS | ETRTTNQFLAVSKGN | 1054 | P08362.1 |
| | STRAIN | | | |
| | EDMONSTON | | | |
| 172 | MEASLES VIRUS | EVDGDVKLSSNLVIL | 1055 | P08362.1 |
| | STRAIN | | | |
| | EDMONSTON | | | |
| 173 | MEASLES VIRUS | EVNGVTIQV | 1056 | P26031.1 |
| | STRAIN | | | |
| | EDMONSTON-B | | | |
| 174 | RUBELLA VIRUS | EVWVTPVI | 1057 | CAJ88851.1 |
| 175 | RUBELLA VIRUS | EVWVTPVIGSQA | 1058 | BAA19893.1 |
| 176 | RUBELLA VIRUS | EWAAAHWWQLTLGAT | 1059 | BAA28178.1 |
| 177 | MEASLES | EWIPRFKVSPYLFTV | 1060 | P06830.1 |
| | MORBILLIVIRUS | | | |
| 178 | BORDETELLA | FEYVDTYGDNAG | 1061 | P04977.1 |
| | PERTUSSIS | | | |
| 179 | MEASLES | FGPLITHGSGMDLYK | 1062 | P06830.1 |
| | MORBILLIVIRUS | | | |
| 180 | MEASLES VIRUS | FIFDALAEV | 1063 | ABK40531.1 |
| | STRAIN | | | |
| | EDMONSTON | | | |
| 181 | MEASLES VIRUS | FISDKIKFL | 1064 | P08362.1 |
| | STRAIN | | | |
| | EDMONSTON | | | |
| 182 | MEASLES VIRUS | FKRNKDKPPITSGSG | 1065 | P04851.1 |
| | STRAIN | | | |
| | EDMONSTON | | | |
| 183 | MEASLES VIRUS | FKRNKDKPPITSGSGGAIRG | 1066 | P04851.1 |
| | STRAIN | | | |
| | EDMONSTON | | | |
| 184 | RUBELLA VIRUS | FKTVRPVALPRTLAP | 1067 | BAA28178.1 |
| 185 | MEASLES VIRUS | FLMDRHIIV | 1068 | ABK40531.1 |
| | STRAIN | | | |
| | EDMONSTON | | | |
| 186 | MEASLES VIRUS | FMAVLLTLQTPTGQI | 1069 | P69353.1 |
| | STRAIN | | | |
| | EDMONSTON | | | |
| 187 | MEASLES VIRUS | FMPEGTVCSQNALYP | 1070 | P69353.1 |
| | STRAIN | | | |
| | EDMONSTON | | | |
| 188 | MEASLES | FMYMSLLGV | 1071 | AAN09804.1 |
| | MORBILLIVIRUS | | | |
| 189 | MEASLES VIRUS | FNVPIKEAGEDCHAP | 1072 | P08362.1 |
| | STRAIN | | | |
| | EDMONSTON | | | |
| 190 | MEASLES | FRDLTWCINPPERIK | 1073 | AAC35876.2 |
| | MORBILLIVIRUS | | | |
| 191 | MEASLES VIRUS | FSHDDPISSDQSRFG | 1074 | P04851.1 |
| | STRAIN | | | |
| | EDMONSTON | | | |
| 192 | MEASLES VIRUS | FSHDDPISSDQSRFGWFENK | 1075 | P04851.1 |
| | STRAIN | | | |
| | EDMONSTON | | | |
| 193 | MEASLES | FTDLVKFISDKIKFL | 1076 | P06830.1 |
| | MORBILLIVIRUS | | | |
| 194 | MEASLES | FTWDQKLWCRHFCVL | 1077 | P06830.1 |
| | MORBILLIVIRUS | | | |
| 195 | BORDETELLA | FVRDGQSVIGACASPYEGRYRDLYD | 1078 | SRC280066 |
| | PERTUSSIS | ALRRLLY | | |
| 196 | BORDETELLA | FVRSGQPVIGACTSPYDGKYWSILYS | 1079 | SRC280066 |
| | PERTUSSIS | RLRKMLY | | |
| 197 | MEASLES | FYKDNPHPKGSRIVI | 1080 | P06830.1 |
| | MORBILLIVIRUS | | | |
| 198 | BORDETELLA | GAASSYFEYVDTYG | 1081 | ACI04548.1 |
| | PERTUSSIS | | | |
| 199 | BORDETELLA | GAFDLKTTFCIMTTRNTGQPA | 1082 | AAA83981.1 |
| | PERTUSSIS | | | |
| 200 | MEASLES VIRUS | GALIGILSLFVESPG | 1083 | P04851.1 |
| | STRAIN | | | |
| | EDMONSTON | | | |
| 201 | MEASLES VIRUS | GALIGILSLFVESPGQLIQR | 1084 | P04851.1 |
| | STRAIN | | | |
| | EDMONSTON | | | |
| 202 | RUBELLA VIRUS | GATPERPR | 1085 | CAJ88851.1 |
| 203 | BORDETELLA | GAYGRCPNGTRALTVAELRGNAEL | 1086 | P04979.1 |
| | PERTUSSIS | | | |
| 204 | RUBELLA VIRUS | GCFAPWDLEATGACI | 1087 | BAA28178.1 |
| 205 | MEASLES | GDINKVLEKLGYS | 1088 | BAB60865.1 |
| | MORBILLIVIRUS | | | |
| 206 | MEASLES | GDINKVLEKLGYSGGDLLG | 1089 | AAL29688.1 |
| | MORBILLIVIRUS | | | |
| 207 | RUBELLA VIRUS | GDLRAVHHRPVPA | 1090 | CAA28880.1 |
| 208 | RUBELLA VIRUS | GDLVEYIMNYTGNQQ | 1091 | BAA28178.1 |
| 209 | MEASLES VIRUS | GDSSITTRSRLLDRL | 1092 | P04851.1 |
| | STRAIN | | | |
| | EDMONSTON | | | |
| 210 | MEASLES VIRUS | GDSSITTRSRLLDRLVRLIG | 1093 | P04851.1 |
| | STRAIN | | | |
| | EDMONSTON | | | |
| 211 | MEASLES | GEDCHAPTYLPAEVD | 1094 | P06830.1 |
| | MORBILLIVIRUS | | | |
| 212 | MEASLES VIRUS | GELSTLESLMNLYQQ | 1095 | P04851.1 |
| | STRAIN | | | |
| | EDMONSTON | | | |
| 213 | MEASLES VIRUS | GELSTLESLMNLYQQMGKPA | 1096 | P04851.1 |
| | STRAIN | | | |
| | EDMONSTON | | | |
| 214 | MUMPS | GEQARYLALLEA | 1097 | P21186.1 |
| | RUBULAVIRUS | | | |
| 215 | RUBELLA VIRUS | GEVWVT | 1098 | BAA19893.1 |
| 216 | RUBELLA VIRUS | GEVWVTPV | 1099 | CAJ88851.1 |
| 217 | RUBELLA VIRUS | GEVWVTPVIGSQAR | 1100 | BAA19893.1 |
| 218 | BORDETELLA | GEYGGVIKDGTPGGA | 1101 | AAA83981.1 |
| | PERTUSSIS | | | |
| 219 | RUBELLA VIRUS | GFLSGVGPMRLRHGADT | 1102 | SRC265968 |
| 220 | MEASLES VIRUS | GFRASDVETAEGGEIHELLRLQ | 1103 | P03422.1 |
| | STRAIN | | | |
| | EDMONSTON-B | | | |
| 221 | BORDETELLA | GGAVPGGAVPGGAVPGGFGPGGFGP | 1104 | P14283.3 |
| | PERTUSSIS | | | |
| 222 | BORDETELLA | GGAVPGGAVPGGFGPGGFGPGGFGP | 1105 | CAA09475.1 |
| | PERTUSSIS | | | |
| 223 | BORDETELLA | GGAVPGGAVPGGFGPGGFGPGGFGP | 1106 | CAA09474.1 |
| | PERTUSSIS | GGFGP | | |
| 224 | MEASLES | GGHITHSGMVGMGVS | 1107 | P06830.1 |
| | MORBILLIVIRUS | | | |
| 225 | MEASLES | GILESRGIKARITHVDTESY | 1108 | P26032.1 |
| | MORBILLIVIRUS | | | |
| 226 | BORDETELLA | GITGETTTTEYSNARYV | 1109 | CAD44970.1 |
| | PERTUSSIS | | | |
| 227 | MEASLES VIRUS | GKEDRRVKQSRGE | 1110 | P04851.1 |
| | STRAIN | | | |
| | EDMONSTON | | | |
| 228 | BORDETELLA | GKVTNGS | 1111 | ACI16088.1 |
| | PERTUSSIS | | | |
| 229 | RUBELLA VIRUS | GLGAWVPAAPCARIW | 1112 | BAA28178.1 |
| 230 | MEASLES VIRUS | GLIGIPALICCCRGR | 1113 | P69353.1 |
| | STRAIN | | | |
| | EDMONSTON | | | |
| 231 | RUBELLA VIRUS | GLLACCAKCLYYLRGAIAPR | 1114 | P07566.1 |
| | STRAIN THERIEN | | | |
| 232 | MEASLES | GLLAIAGIRLHRAAI | 1115 | P06830.1 |
| | MORBILLIVIRUS | | | |
| 233 | RUBELLA VIRUS | GLQPRADMAAPPTLPQ | 1116 | NP_740663.1 |
| 234 | MEASLES | GMGVSCTVTREDGTNRR | 1117 | AAR89413.1 |
| | MORBILLIVIRUS | | | |
| 235 | MEASLES | GMYGGTYLVEKP | 1118 | AAR89413.1 |
| | MORBILLIVIRUS | | | |
| 236 | BORDETELLA | GNAELQTYLRQITPGWSIYGLYDGTY | 1119 | P04979.1 |
| | PERTUSSIS | LG | | |
| 237 | RUBELLA VIRUS | GNCHLTVNGEDVGAV | 1120 | BAA28178.1 |
| 238 | BORDETELLA | GNNDNVLDHLTGR | 1121 | P04977.1 |
| | PERTUSSIS | | | |
| 239 | BORDETELLA | GNNDNVLDHLTGRSC | 1122 | P04977.1 |
| | PERTUSSIS | | | |
| 240 | MEASLES VIRUS | GNRFILSQGNLIANC | 1123 | P69353.1 |
| | STRAIN | | | |
| | EDMONSTON | | | |
| 241 | RUBELLA VIRUS | GNRGRGQRRDWSRAPPPPEERQETR | 1124 | P07566.1 |
| | | SQTPAPKPS | | |
| 242 | RUBELLA VIRUS | GPGEVWVT | 1125 | CAJ88851.1 |
| 243 | RUBELLA VIRUS | GPMRLRHGADTRCGRLI | 1126 | P07566.1 |
| | STRAIN THERIEN | | | |
| 244 | BORDETELLA | GPNHTKV | 1127 | ACI16083.1 |
| | PERTUSSIS | | | |
| 245 | MEASLES VIRUS | GPRQAQVSF | 1128 | P10050.1 |
| | STRAIN HALLE | | | |
| 246 | MEASLES VIRUS | GPRQAQVSFLQGDQS | 1129 | P04851.1 |
| | STRAIN | | | |
| | EDMONSTON | | | |
| 247 | MEASLES VIRUS | GPRQAQVSFLQGDQSENELP | 1130 | P04851.1 |
| | STRAIN | | | |
| | EDMONSTON | | | |
| 248 | MEASLES | GRGYNVSSIVTMTSQ | 1131 | P06830.1 |
| | MORBILLIVIRUS | | | |
| 249 | BORDETELLA | GRTPFII | 1132 | ACI16083.1 |
| | PERTUSSIS | | | |
| 250 | RUBELLA VIRUS | GSPNCHGPDWASPVC | 1133 | BAA28178.1 |
| 251 | RUBELLA VIRUS | GSQARKCGLHIRAGP | 1134 | BAA28178.1 |
| 252 | BORDETELLA | GSSNSAFVSTSSSRR | 1135 | P04977.1 |
| | PERTUSSIS | | | |
| 253 | MEASLES VIRUS | GSTKSCARTLVSGSF | 1136 | P69353.1 |
| | STRAIN | | | |
| | EDMONSTON | | | |
| 254 | RUBELLA VIRUS | GSYYKQYHPTACEVE | 1137 | BAA28178.1 |
| 255 | RUBELLA VIRUS | GTHTTAVSETRQTWA | 1138 | BAA28178.1 |
| 256 | MEASLES VIRUS | GTIINQDPDKILTYI | 1139 | P69353.1 |
| | STRAIN | | | |
| | EDMONSTON | | | |
| 257 | BORDETELLA | GTLVRMAPVIG | 1140 | ADA85124.1 |
| | PERTUSSIS | | | |
| 258 | MEASLES VIRUS | GTPLDIDTASESS | 1141 | P04851.1 |
| | STRAIN | | | |
| | EDMONSTON | | | |
| 259 | BORDETELLA | GTYLGQAYGGIIKDAPPGAGFIYRETFC | 1142 | P04979.1 |
| | PERTUSSIS | | | |
| 260 | BORDETELLA | GVATKGLGVHAKSSDWG | 1143 | P15318.2 |
| | PERTUSSIS | | | |
| 261 | CORYNEBACTERIUM | GVLLPTIPGKLDVNKSKTHI | 1144 | AAV70486.1 |
| | DIPHTHERIAE | | | |
| 262 | MEASLES | GVLSVDLSLTVELKI | 1145 | P06830.1 |
| | MORBILLIVIRUS | | | |
| 263 | MEASLES | GVPIELQVECFTWDQ | 1146 | P06830.1 |
| | MORBILLIVIRUS | | | |
| 264 | MEASLES VIRUS | GVSCTVTREDGTNRR | 1147 | P08362.1 |
| | STRAIN | | | |
| | EDMONSTON | | | |
| 265 | MEASLES VIRUS | GVSYNIGSQEWYTTV | 1148 | P69353.1 |
| | STRAIN | | | |
| | EDMONSTON | | | |
| 266 | MEASLES VIRUS | GYNVSSIVTMTSQGM | 1149 | P08362.1 |
| | STRAIN | | | |
| | EDMONSTON | | | |
| 267 | MEASLES | HFCVLADSESGGHIT | 1150 | P06830.1 |
| | MORBILLIVIRUS | | | |
| 268 | MEASLES | HGEDSITIPYQGSGK | 1151 | P06830.1 |
| | MORBILLIVIRUS | | | |
| 269 | RUBELLA VIRUS | HGPDWASP | 1152 | BAA19893.1 |
| 270 | RUBELLA VIRUS | HGPDWASPVCQRHSP | 1153 | BAA28178.1 |
| 271 | RUBELLA VIRUS | HGPDWASPVCQRHSPDCSRLVG | 1154 | CAJ88851.1 |
| 272 | RUBELLA VIRUS | HGPDWASPVCQRHSPDCSRLVGATPE | 1155 | CAJ88851.1 |
| | STRAIN M33 | RPRLRLV | | |
| 273 | MEASLES VIRUS | HITHSGMEGMGVSCT | 1156 | P08362.1 |
| | STRAIN | | | |
| | EDMONSTON | | | |
| 274 | MEASLES | HKSLSTNLDVTNSIE | 1157 | P06830.1 |
| | MORBILLIVIRUS | | | |
| 275 | MEASLES VIRUS | HLMIDRPYV | 1158 | P08362.1 |
| | STRAIN | | | |
| | EDMONSTON | | | |
| 276 | MEASLES VIRUS | HLPTGTPLDIDTA | 1159 | P04851.1 |
| | STRAIN | | | |
| | EDMONSTON | | | |
| 277 | MEASLES VIRUS | HLPTGTPLDIDTATESSQDPQDSR | 1160 | Q77M43.1 |
| | STRAIN | | | |
| | EDMONSTON-B | | | |
| 278 | MEASLES | HMTNYLEQPVSNDLS | 1161 | P06830.1 |
| | MORBILLIVIRUS | | | |
| 279 | MEASLES VIRUS | HQSLVIKLMPNITLL | 1162 | P69353.1 |
| | STRAIN | | | |
| | EDMONSTON | | | |
| 280 | MEASLES | HRAAIYTAEIHKSLS | 1163 | P06830.1 |
| | MORBILLIVIRUS | | | |
| 281 | BORDETELLA | HRMQEAVEAERAGRGTGH | 1164 | P04977.1 |
| | PERTUSSIS | | | |
| 282 | MEASLES VIRUS | HVDTESYFIVLSIAY | 1165 | P69353.1 |
| | STRAIN | | | |
| | EDMONSTON | | | |
| 283 | MEASLES VIRUS | HWGNLSKIGVVGIGS | 1166 | P69353.1 |
| | STRAIN | | | |
| | EDMONSTON | | | |
| 284 | RUBELLA VIRUS | HWWQLTLGATCALPL | 1167 | BAA28178.1 |
| 285 | RUBELLA VIRUS | HYRNASDVLPGHWLQGGWGCYNL | 1168 | NP_740663.1 |
| 286 | MEASLES VIRUS | IDLGPPISLERLDVG | 1169 | P69353.1 |
| | STRAIN | | | |
| | EDMONSTON | | | |
| 287 | MEASLES VIRUS | IEAIRQAGQEMILAV | 1170 | P69353.1 |
| | STRAIN | | | |
| | EDMONSTON | | | |
| 288 | RUBELLA VIRUS | IETRSARHP | 1171 | CAA28880.1 |
| | STRAIN M33 | | | |
| 289 | MEASLES VIRUS | IGSQEWYTTVPKYVA | 1172 | P69353.1 |
| | STRAIN | | | |
| | EDMONSTON | | | |
| 290 | MEASLES VIRUS | IKGVIVHRLEGVSYN | 1173 | P69353.1 |
| | STRAIN | | | |
| | EDMONSTON | | | |
| 291 | MEASLES VIRUS | IKHIIIVPIPGDSSI | 1174 | P04851.1 |
| | STRAIN | | | |
| | EDMONSTON | | | |
| 292 | MEASLES VIRUS | IKHIIIVPIPGDSSITTRSR | 1175 | P04851.1 |
| | STRAIN | | | |
| | EDMONSTON | | | |
| 293 | BORDETELLA | IKLKDCP | 1176 | ACI16083.1 |
| | PERTUSSIS | | | |
| 294 | MEASLES VIRUS | IKLMPNITLLNNCTR | 1177 | P69353.1 |
| | STRAIN | | | |
| | EDMONSTON | | | |
| 295 | MEASLES | ILLERLDVGT | 1178 | AAF85664.1 |
| | MORBILLIVIRUS | | | |
| 296 | MEASLES | ILPGQDLQYV | 1179 | P08362.1 |
| | MORBILLIVIRUS | | | |
| 297 | MEASLES VIRUS | ILTYIAADHCPVVEV | 1180 | P69353.1 |
| | STRAIN | | | |
| | EDMONSTON | | | |
| 298 | MEASLES | INQDPDKILTY | 1181 | AAL29688.1 |
| | MORBILLIVIRUS | | | |
| 299 | MEASLES VIRUS | IPRFKVSPYLFNVPI | 1182 | P08362.1 |
| | STRAIN | | | |
| | EDMONSTON | | | |
| 300 | MEASLES VIRUS | IQALSYALGGDINKV | 1183 | P69353.1 |
| | STRAIN | | | |
| | EDMONSTON | | | |
| 301 | RUBELLA VIRUS | IRAGPYGHATVEMPE | 1184 | BAA28178.1 |
| 302 | BORDETELLA | IRMGTDK | 1185 | ACI16088.1 |
| | PERTUSSIS | | | |
| 303 | MEASLES VIRUS | ISNFDESSCTFMPEG | 1186 | P69353.1 |
| | STRAIN | | | |
| | EDMONSTON | | | |
| 304 | MEASLES VIRUS | ITAGIALHQSMLNSQ | 1187 | P69353.1 |
| | STRAIN | | | |
| | EDMONSTON | | | |
| 305 | MEASLES VIRUS | ITDDPDVSIRLLEVV | 1188 | P04851.1 |
| | STRAIN | | | |
| | EDMONSTON | | | |
| 306 | MEASLES VIRUS | ITDDPDVSIRLLEVVQSDQS | 1189 | P04851.1 |
| | STRAIN | | | |
| | EDMONSTON | | | |
| 307 | BORDETELLA | ITTYV | 1190 | ACI16083.1 |
| | PERTUSSIS | | | |
| 308 | MEASLES VIRUS | IVEAGLASFILTIKF | 1191 | P04851.1 |
| | STRAIN | | | |
| | EDMONSTON | | | |
| 309 | MEASLES VIRUS | IVEAGLASFILTIKFGIETM | 1192 | P04851.1 |
| | STRAIN | | | |
| | EDMONSTON | | | |
| 310 | MEASLES VIRUS | IVEAGLASFILTIKFGIETMYPALG | 1193 | P04851.1 |
| | STRAIN | | | |
| | EDMONSTON | | | |
| 311 | RUBELLA VIRUS | KALEAQSRALRAELAA | 1194 | P07566.1 |
| 312 | MEASLES VIRUS | KARITHVDTESYFIV | 1195 | P69353.1 |
| | STRAIN | | | |
| | EDMONSTON | | | |
| 313 | RUBELLA VIRUS | KCGLHIRAGPYGHAT | 1196 | BAA28178.1 |
| 314 | MEASLES VIRUS | KCYTTGTIINQDPDK | 1197 | P69353.1 |
| | STRAIN | | | |
| | EDMONSTON | | | |
| 315 | MEASLES VIRUS | KDNPHPKGSR | 1198 | P08362.1 |
| | STRAIN | | | |
| | EDMONSTON | | | |
| 316 | MEASLES VIRUS | KDNRIPSYGVLSVDL | 1199 | P08362.1 |
| | STRAIN | | | |
| | EDMONSTON | | | |
| 317 | MEASLES | KFLNPDREYDFRDLT | 1200 | AAC35876.2 |
| | MORBILLIVIRUS | | | |
| 318 | RUBELLA VIRUS | KFVTAALLN | 1201 | BAA28178.1 |
| 319 | MEASLES VIRUS | KGNCSGPTTIR | 1202 | P08362.1 |
| | STRAIN | | | |
| | EDMONSTON | | | |
| 320 | MEASLES | KIKFLNPDREYDFRD | 1203 | P06830.1 |
| | MORBILLIVIRUS | | | |
| 321 | RUBELLA VIRUS | KIVDGGCFAPWDLEA | 1204 | BAA28178.1 |
| 322 | MEASLES VIRUS | KLGLKLLRYYTEILS | 1205 | P69353.1 |
| | STRAIN | | | |
| | EDMONSTON | | | |
| 323 | MEASLES VIRUS | KLGVWKSPTDMQSWV | 1206 | P08362.1 |
| | STRAIN | | | |
| | EDMONSTON | | | |
| 324 | BORDETELLA | KLKECPQ | 1207 | ACI16088.1 |
| | PERTUSSIS | | | |
| 325 | MEASLES | KLLRYYTEI | 1208 | P26031.1 |
| | MORBILLIVIRUS | | | |
| 326 | MEASLES VIRUS | KLMPFSGDFV | 1209 | ABK40531.1 |
| | STRAIN | | | |
| | EDMONSTON | | | |
| 327 | MEASLES | KLMPNITLL | 1210 | P26031.1 |
| | MORBILLIVIRUS | | | |
| 328 | MEASLES | KLRMETCFQQACKGKIQALCENPEWA | 1211 | AAR89413.1 |
| | MORBILLIVIRUS | | | |
| 329 | MEASLES | KLWCRHFCV | 1212 | P08362.1 |
| | MORBILLIVIRUS | | | |
| 330 | MEASLES VIRUS | KLWCRHFCVL | 1213 | P08362.1 |
| | STRAIN | | | |
| | EDMONSTON | | | |
| 331 | MEASLES | KLWESPQEI | 1214 | BAB60863.1 |
| | MORBILLIVIRUS | | | |
| 332 | MEASLES VIRUS | KMSSAVGFV | 1215 | ABO69699.1 |
| | STRAIN | | | |
| | EDMONSTON | | | |
| 333 | MEASLES VIRUS | KMSSAVGFVPDTGPASR | 1216 | P03422.1 |
| | STRAIN | | | |
| | EDMONSTON-B | | | |
| 334 | BORDETELLA | KMVYATN | 1217 | ACI16083.1 |
| | PERTUSSIS | | | |
| 335 | MEASLES VIRUS | KPDLTGTSKSYVRSL | 1218 | P69353.1 |
| | STRAIN | | | |
| | EDMONSTON | | | |
| 336 | MEASLES | KPNLSSKRSELSQLS | 1219 | P08362.1 |
| | MORBILLIVIRUS | | | |
| 337 | MEASLES VIRUS | KPNLSSKRSELSQLSMYRVF | 1220 | P08362.1 |
| | STRAIN | | | |
| | EDMONSTON | | | |
| 338 | MEASLES VIRUS | KQSRGEARESYRETG | 1221 | P04851.1 |
| | STRAIN | | | |
| | EDMONSTON | | | |
| 339 | MEASLES VIRUS | KQSRGEARESYRETGPSRAS | 1222 | P04851.1 |
| | STRAIN | | | |
| | EDMONSTON | | | |
| 340 | MEASLES VIRUS | KRFAGVVLAGAALGV | 1223 | P69353.1 |
| | STRAIN | | | |
| | EDMONSTON | | | |
| 341 | MEASLES VIRUS | KRTPGNKPRIAEMIC | 1224 | P04851.1 |
| | STRAIN | | | |
| | EDMONSTON | | | |
| 342 | MEASLES VIRUS | KRTPGNKPRIAEMICDIDTY | 1225 | P04851.1 |
| | STRAIN | | | |
| | EDMONSTON | | | |
| 343 | MEASLES | KSNHNNVYWLTIPPMKNLALGVINTL | 1226 | AAR89413.1 |
| | MORBILLIVIRUS | | | |
| 344 | MEASLES | KVSPYLFNV | 1227 | P08362.1 |
| | MORBILLIVIRUS | | | |
| 345 | BORDETELLA | KVVQLPKISKNALKANG | 1228 | ACI16083.1 |
| | PERTUSSIS | | | |
| 346 | BORDETELLA | KVVQLPKISKNALRNDG | 1229 | ACI16087.1 |
| | PERTUSSIS | | | |
| 347 | BORDETELLA | LAHRRIPPENIR | 1230 | P04977.1 |
| | PERTUSSIS | | | |
| 348 | BORDETELLA | LALALWAGFALS | 1231 | P11092.1 |
| | PERTUSSIS | | | |
| 349 | RUBELLA VIRUS | LAPGGGNCHLTVNGE | 1232 | BAA28178.1 |
| 350 | MEASLES VIRUS | LAQIWVLLAKAVTAP | 1233 | P04851.1 |
| | STRAIN | | | |
| | EDMONSTON | | | |
| 351 | MEASLES VIRUS | LAQIWVLLAKAVTAPDTAAD | 1234 | P04851.1 |
| | STRAIN | | | |
| | EDMONSTON | | | |
| 352 | RUBELLA VIRUS | LASYFNPGGSYYKQYHPTACEVEPAF | 1235 | BAA19893.1 |
| | | GHS | | |
| 353 | MEASLES | LAVSKGNCSGPTTIR | 1236 | P06830.1 |
| | MORBILLIVIRUS | | | |
| 354 | MEASLES VIRUS | LCENPEWAPLKDNRI | 1237 | P08362.1 |
| | STRAIN | | | |
| | EDMONSTON | | | |
| 355 | MEASLES | LDRLVRLIG | 1238 | ABI54110.1 |
| | MORBILLIVIRUS | | | |
| 356 | CORYNEBACTERIUM | LEEEGVTPL | 1239 | P33120.2 |
| | DIPHTHERIAE | | | |
| 357 | BORDETELLA | LEHRMQEAVEAERAGRGTGHFI | 1240 | CAD44970.1 |
| | PERTUSSIS | | | |
| 358 | MEASLES VIRUS | LEKLGYSGGDLLGIL | 1241 | P69353.1 |
| | STRAIN | | | |
| | EDMONSTON | | | |
| 359 | MEASLES VIRUS | LEQPVSNDLS | 1242 | P08362.1 |
| | STRAIN | | | |
| | EDMONSTON | | | |
| 360 | MEASLES VIRUS | LERKWLDVVRNIIAE | 1243 | P04851.1 |
| | STRAIN | | | |
| | EDMONSTON | | | |
| 361 | MEASLES VIRUS | LERKWLDVVRNIIAEDLSLR | 1244 | P04851.1 |
| | STRAIN | | | |
| | EDMONSTON | | | |
| 362 | MEASLES VIRUS | LFGPSLRDPISAEIS | 1245 | P69353.1 |
| | STRAIN | | | |
| | EDMONSTON | | | |
| 363 | MEASLES | LGELKLAALCHGEDS | 1246 | P06830.1 |
| | MORBILLIVIRUS | | | |
| 364 | MEASLES VIRUS | LGGKEDRRVKQSR | 1247 | P04851.1 |
| | STRAIN | | | |
| | EDMONSTON | | | |
| 365 | RUBELLA VIRUS | LGHDGHHGGTLRVGQHHRNASDVL | 1248 | ABD64214.1 |
| 366 | RUBELLA VIRUS | LGSPNCHGPDWASPVCQRHS | 1249 | P07566.1 |
| | STRAIN THERIEN | | | |
| 367 | RUBELLA VIRUS | LGSPNCHGPDWASPVCQRHSPDCSRLV | 1250 | P07566.1 |
| | STRAIN THERIEN | | | |
| 368 | RUBELLA VIRUS | LHDPDTEAPTEACVTSWL | 1251 | ABD64214.1 |
| 369 | MEASLES VIRUS | LIANCASILCKCYTT | 1252 | P69353.1 |
| | STRAIN | | | |
| | EDMONSTON | | | |
| 370 | MEASLES | LIGLLAIAGIRLHRAAIYTAEIHK | 1253 | AAR89413.1 |
| | MORBILLIVIRUS | | | |
| 371 | MEASLES VIRUS | LIPSMNQLSCDLIGQ | 1254 | P69353.1 |
| | STRAIN | | | |
| | EDMONSTON | | | |
| 372 | MEASLES VIRUS | LKIKIASGFGPLITH | 1255 | P08362.1 |
| | STRAIN | | | |
| | EDMONSTON | | | |
| 373 | MEASLES | LKIKIASGFGPLITHGSGMDLYK | 1256 | AAR89413.1 |
| | MORBILLIVIRUS | | | |
| 374 | BORDETELLA | LKLYFEP | 1257 | ACI16088.1 |
| | PERTUSSIS | | | |
| 375 | MEASLES VIRUS | LLAVLFVMFL | 1258 | P08362.1 |
| | STRAIN | | | |
| | EDMONSTON | | | |
| 376 | MEASLES VIRUS | LLDRLVRLIGNPDVS | 1259 | P04851.1 |
| | STRAIN | | | |
| | EDMONSTON | | | |
| 377 | MEASLES VIRUS | LLDRLVRLIGNPDVSGPKLT | 1260 | P04851.1 |
| | STRAIN | | | |
| | EDMONSTON | | | |
| 378 | MEASLES VIRUS | LLESSDQILRSMKGL | 1261 | P69353.1 |
| | STRAIN | | | |
| | EDMONSTON | | | |
| 379 | MEASLES | LLETRTTNQFLAVSK | 1262 | P06830.1 |
| | MORBILLIVIRUS | | | |
| 380 | MEASLES VIRUS | LLEVVQSDQSQSGLT | 1263 | P04851.1 |
| | STRAIN | | | |
| | EDMONSTON | | | |
| 381 | MEASLES VIRUS | LLEVVQSDQSQSGLTFASR | 1264 | P04851.1 |
| | STRAIN | | | |
| | EDMONSTON | | | |
| 382 | MEASLES VIRUS | LLEVVQSDQSQSGLTFASRG | 1265 | P04851.1 |
| | STRAIN | | | |
| | EDMONSTON | | | |
| 383 | MEASLES | LLGILESRGIKARIT | 1266 | AAL29688.1 |
| | MORBILLIVIRUS | | | |
| 384 | RUBELLA VIRUS | LLRTAPGP | 1267 | CAJ88851.1 |
| 385 | MEASLES VIRUS | LLRYYTEILSLFGPS | 1268 | P69353.1 |
| | STRAIN | | | |
| | EDMONSTON | | | |
| 386 | RUBELLA VIRUS | LLVPWVLIFMVCRRACRRRG | 1269 | P07566.1 |
| | STRAIN THERIEN | | | |
| 387 | MEASLES VIRUS | LLWRSRCKIV | 1270 | ABK40528.1 |
| | STRAIN | | | |
| | EDMONSTON | | | |
| 388 | MEASLES | LLWSYAMGV | 1271 | P04851.1 |
| | MORBILLIVIRUS | | | |
| 389 | MEASLES VIRUS | LLWSYAMGVGVELEN | 1272 | P04851.1 |
| | STRAIN | | | |
| | EDMONSTON | | | |
| 390 | MEASLES VIRUS | LLWSYAMGVGVELENSMGGL | 1273 | P04851.1 |
| | STRAIN | | | |
| | EDMONSTON | | | |
| 391 | MEASLES | LMIDRPYVL | 1274 | P08362.1 |
| | MORBILLIVIRUS | | | |
| 392 | MEASLES VIRUS | LNAMTQNIRPVQSVA | 1275 | P69353.1 |
| | STRAIN | | | |
| | EDMONSTON | | | |
| 393 | RUBELLA VIRUS | LNTPPPYQVSCGGES | 1276 | BAA28178.1 |
| 394 | MEASLES VIRUS | LRDPISAEISIQALS | 1277 | P69353.1 |
| | STRAIN | | | |
| | EDMONSTON | | | |
| 395 | BORDETELLA | LRGSGDLQEYLRHVTR | 1278 | AAA83981.1 |
| | PERTUSSIS | | | |
| 396 | RUBELLA VIRUS | LRLVDADD | 1279 | CAJ88851.1 |
| 397 | RUBELLA VIRUS | LRLVDADDPLLR | 1280 | BAA19893.1 |
| 398 | RUBELLA VIRUS | LRLVDADDPLLRTAPGPGEVWVTPVI | 1281 | BAA19893.1 |
| | | GSQAR | | |
| 399 | BORDETELLA | LRRLLYMIYMSGLAVRVHVSKEEQY | 1282 | P04979.1 |
| | PERTUSSIS | YDY | | |
| 400 | RUBELLA VIRUS | LRTAPGPG | 1283 | CAJ88851.1 |
| 401 | RUBELLA VIRUS | LRVGQHYRNASDVLPGHWLQ | 1284 | NP_740663.1 |
| 402 | BORDETELLA | LRYLA | 1285 | ACI16088.1 |
| | PERTUSSIS | | | |
| 403 | MEASLES VIRUS | LSCKPWQESRKNK | 1286 | P04851.1 |
| | STRAIN | | | |
| | EDMONSTON | | | |
| 404 | MEASLES | LSEIKGVIVHRLEGV | 1287 | AAL29688.1 |
| | MORBILLIVIRUS | | | |
| 405 | MEASLES VIRUS | LSIAYPTLSEIKGVI | 1288 | P69353.1 |
| | STRAIN | | | |
| | EDMONSTON | | | |
| 406 | MEASLES VIRUS | LSLLDLYLGRGYNVS | 1289 | P08362.1 |
| | STRAIN | | | |
| | EDMONSTON | | | |
| 407 | MEASLES VIRUS | LSQGNLIANCASILC | 1290 | P69353.1 |
| | STRAIN | | | |
| | EDMONSTON | | | |
| 408 | MEASLES | LSSHRGVIADNQAKW | 1291 | P06830.1 |
| | MORBILLIVIRUS | | | |
| 409 | MEASLES VIRUS | LSVDLSLTVELKIKI | 1292 | P08362.1 |
| | STRAIN | | | |
| | EDMONSTON | | | |
| 410 | BORDETELLA | LTGISICNPGSSLC | 1293 | AAA83981.1 |
| | PERTUSSIS | | | |
| 411 | MEASLES VIRUS | LTIKFGIETMYPALG | 1294 | P04851.1 |
| | STRAIN | | | |
| | EDMONSTON | | | |
| 412 | MEASLES VIRUS | LTIKFGIETMYPALGLHEFA | 1295 | P04851.1 |
| | STRAIN | | | |
| | EDMONSTON | | | |
| 413 | MEASLES VIRUS | LTLQTPTGQIHWGNL | 1296 | P69353.1 |
| | STRAIN | | | |
| | EDMONSTON | | | |
| 414 | RUBELLA VIRUS | LVDADDPL | 1297 | CAJ88851.1 |
| 415 | RUBELLA VIRUS | LVDADDPLLR | 1298 | BAA19893.1 |
| 416 | MEASLES VIRUS | LVEKPNLSSKRSELS | 1299 | P08362.1 |
| | STRAIN | | | |
| | EDMONSTON | | | |
| 417 | RUBELLA VIRUS | LVGATPE | 1300 | BAA19893.1 |
| 418 | RUBELLA VIRUS | LVGATPER | 1301 | CAJ88851.1 |
| 419 | MEASLES | LVKLGVWKSPTGMQS | 1302 | P06830.1 |
| | MORBILLIVIRUS | | | |
| 420 | MEASLES VIRUS | LVSGSFGNRFILSQGNLI | 1303 | P26031.1 |
| | STRAIN | | | |
| | EDMONSTON-B | | | |
| 421 | MEASLES VIRUS | LYKSNHNNVYWLTIP | 1304 | P08362.1 |
| | STRAIN | | | |
| | EDMONSTON | | | |
| 422 | MEASLES VIRUS | LYPMSPLLQECLRGSTKSCARTLVS | 1305 | P69353.1 |
| | STRAIN | | | |
| | EDMONSTON | | | |
| 423 | RUBELLA VIRUS | MASTTPITMEDLQKALEA | 1306 | P07566.1 |
| 424 | RUBELLA VIRUS | MASTTPITMEDLQKALEAQSR | 1307 | ABD64200.1 |
| 425 | RUBELLA VIRUS | MASTTPITMEDLQKALEAQSRALRA | 1308 | P07566.1 |
| | STRAIN THERIEN | ELAA | | |
| 426 | RUBELLA VIRUS | MASTTPITMEDLQKALEAQSRALRA | 1309 | ABD64200.1 |
| | | GLAA | | |
| 427 | RUBELLA VIRUS | MASTTPITMEDLQKALETQSRVLRAG | 1310 | CAA33016.1 |
| | VACCINE STRAIN | LTA | | |
| | RA27/3 | | | |
| 428 | MEASLES VIRUS | MATLLRSLALFKRNK | 1311 | P04851.1 |
| | STRAIN | | | |
| | EDMONSTON | | | |
| 429 | MEASLES VIRUS | MATLLRSLALFKRNKDKPPI | 1312 | P04851.1 |
| | STRAIN | | | |
| | EDMONSTON | | | |
| 430 | MEASLES | MDLYKSNHNNVYWLT | 1313 | P06830.1 |
| | MORBILLIVIRUS | | | |
| 431 | RUBELLA VIRUS | MEDLQKALEAQSRA | 1314 | P07566.1 |
| 432 | RUBELLA VIRUS | MEDLQKALEAQSRALRAELAA | 1315 | P07566.1 |
| 433 | MEASLES VIRUS | MGLKVNVSAIFMAVL | 1316 | P69353.1 |
| | STRAIN | | | |
| | EDMONSTON | | | |
| 434 | MEASLES | MIDRPYVLLAVLFVM | 1317 | P06830.1 |
| | MORBILLIVIRUS | | | |
| 435 | MEASLES VIRUS | MILAVQGVQDYINNE | 1318 | P69353.1 |
| | STRAIN | | | |
| | EDMONSTON | | | |
| 436 | MEASLES VIRUS | MLNSQAIDNLRASLE | 1319 | P69353.1 |
| | STRAIN | | | |
| | EDMONSTON | | | |
| 437 | MEASLES VIRUS | MNALVNSTLLETRTT | 1320 | P08362.1 |
| | STRAIN | | | |
| | EDMONSTON | | | |
| 438 | RUBELLA VIRUS | MNYTGNQQSRWGLGSPNCHGPDWA | 1321 | BAA19893.1 |
| | | SPVCQRHS | | |
| 439 | MEASLES VIRUS | MQSWVPLSTDDPVID | 1322 | P08362.1 |
| | STRAIN | | | |
| | EDMONSTON | | | |
| 440 | MEASLES | MSLSLLDLYLGRGYN | 1323 | P06830.1 |
| | MORBILLIVIRUS | | | |
| 441 | MEASLES VIRUS | MSPLLQECLRGSTKS | 1324 | P69353.1 |
| | STRAIN | | | |
| | EDMONSTON | | | |
| 442 | MEASLES | MSPQRDRINAFYKDN | 1325 | P06830.1 |
| | MORBILLIVIRUS | | | |
| 443 | MEASLES | MYRVFEVSVIRNPGL | 1326 | P06830.1 |
| | MORBILLIVIRUS | | | |
| 444 | MEASLES VIRUS | NALYPMSPLLQECLR | 1327 | P69353.1 |
| | STRAIN | | | |
| | EDMONSTON | | | |
| 445 | RUBELLA VIRUS | NCHGPDWASPVCQRHSPDCSRLVGAT | 1328 | P07566.1 |
| | STRAIN THERIEN | | | |
| 446 | MEASLES VIRUS | NFGRSYFDPAYFRLG | 1329 | P04851.1 |
| | STRAIN | | | |
| | EDMONSTON | | | |
| 447 | MEASLES VIRUS | NFGRSYFDPAYFRLGQEMVR | 1330 | P04851.1 |
| | STRAIN | | | |
| | EDMONSTON | | | |
| 448 | RUBELLA VIRUS | NGTQRACTFWAVNAY | 1331 | BAA28178.1 |
| 449 | MEASLES VIRUS | NGVTIQVGSRRYPDA | 1332 | P69353.1 |
| | STRAIN | | | |
| | EDMONSTON | | | |
| 450 | MEASLES VIRUS | NIIAEDLSLRRFMVA | 1333 | P04851.1 |
| | STRAIN | | | |
| | EDMONSTON | | | |
| 451 | MEASLES VIRUS | NIIAEDLSLRRFMVALILDI | 1334 | P04851.1 |
| | STRAIN | | | |
| | EDMONSTON | | | |
| 452 | MEASLES VIRUS | NITLLNNCTRVEIAE | 1335 | P69353.1 |
| | STRAIN | | | |
| | EDMONSTON | | | |
| 453 | MEASLES | NLALGVINTLEWIPR | 1336 | P06830.1 |
| | MORBILLIVIRUS | | | |
| 454 | CORYNEBACTERUMI | NLFQVVHWSYNRPAYSPG | 1337 | SRC280292 |
| | DIPHTHERIAE | | | |
| 455 | MEASLES VIRUS | NLVILPGQDLQYVLA | 1338 | P08362.1 |
| | STRAIN | | | |
| | EDMONSTON | | | |
| 456 | MEASLES VIRUS | NLYQQMGKPAPYMVN | 1339 | P04851.1 |
| | STRAIN | | | |
| | EDMONSTON | | | |
| 457 | MEASLES VIRUS | NLYQQMGKPAPYMVNLENSI | 1340 | P04851.1 |
| | STRAIN | | | |
| | EDMONSTON | | | |
| 458 | MEASLES VIRUS | NNCTRVEIAEYRRLL | 1341 | P69353.1 |
| | STRAIN | | | |
| | EDMONSTON | | | |
| 459 | MEASLES VIRUS | NPDREYDFRD | 1342 | P08362.1 |
| | STRAIN | | | |
| | EDMONSTON | | | |
| 460 | MEASLES VIRUS | NPDVSGPKL | 1343 | P10050.1 |
| | STRAIN HALLE | | | |
| 461 | MEASLES VIRUS | NPDVSGPKLTGALIG | 1344 | P04851.1 |
| | STRAIN | | | |
| | EDMONSTON | | | |
| 462 | MEASLES VIRUS | NPDVSGPKLTGALIGILSLF | 1345 | P04851.1 |
| | STRAIN | | | |
| | EDMONSTON | | | |
| 463 | MEASLES | NPPERIKLDYDQYCA | 1346 | P06830.1 |
| | MORBILLIVIRUS | | | |
| 464 | MEASLES | NQAKWAVPTTRTDDK | 1347 | P06830.1 |
| | MORBILLIVIRUS | | | |
| 465 | MEASLES | NQDPDKILTYIAADH | 1348 | AAF02706.1 |
| | MORBILLIVIRUS | | | |
| 466 | MEASLES VIRUS | NQLSCDLIGQKLGLK | 1349 | P69353.1 |
| | STRAIN | | | |
| | EDMONSTON | | | |
| 467 | RUBELLA VIRUS | NQQSRWGLGSPNCHGPDWASPVCQR | 1350 | ABD64214.1 |
| | | HS | | |
| 468 | MUMPS | NSTLGVKSAREF | 1351 | ABP48111.1 |
| | RUBULAVIRUS | | | |
| 469 | RUBELLA VIRUS | NTPHGQLEVQVPPDP | 1352 | BAA28178.1 |
| 470 | MEASLES VIRUS | NVSAIFMAVLLTLQT | 1353 | P69353.1 |
| | STRAIN | | | |
| | EDMONSTON | | | |
| 471 | MEASLES | PAEVDGDVKLSSNLV | 1354 | P06830.1 |
| | MORBILLIVIRUS | | | |
| 472 | RUBELLA VIRUS | PAFGHSDAACWGFPT | 1355 | BAA28178.1 |
| 473 | MEASLES VIRUS | PALICCCRGRCNKKG | 1356 | P69353.1 |
| | STRAIN | | | |
| | EDMONSTON | | | |
| 474 | MEASLES | PDKILTYIAADHC | 1357 | AAF02706.1 |
| | MORBILLIVIRUS | | | |
| 475 | MEASLES VIRUS | PERIKLDYDQYCADV | 1358 | P08362.1 |
| | STRAIN | | | |
| | EDMONSTON | | | |
| 476 | RUBELLA VIRUS | PERPRLRL | 1359 | CAJ88851.1 |
| 477 | RUBELLA VIRUS | PGCATQAPVPVRLAG | 1360 | BAA28178.1 |
| 478 | RUBELLA VIRUS | PGCATQAPVPVRLAGVRFESKIVDGG | 1361 | CAJ88851.1 |
| | VACCINE STRAIN | CFA | | |
| | RA27/3 | | | |
| 479 | RUBELLA VIRUS | PGEVWVTP | 1362 | CAJ88851.1 |
| 480 | RUBELLA VIRUS | PGEVWVTPVIGSQAR | 1363 | BAA28178.1 |
| 481 | CORYNEBACTERIUM | PGKLDVNKSKTHISVN | 1364 | CAE11230.1 |
| | DIPHTHERIAE | | | |
| 482 | MEASLES VIRUS | PGLGAPVFHMTNYLE | 1365 | P08362.1 |
| | STRAIN | | | |
| | EDMONSTON | | | |
| 483 | RUBELLA VIRUS | PGPGEVWV | 1366 | CAJ88851.1 |
| 484 | RUBELLA VIRUS | PHKTVRVKFHTETRT | 1367 | BAA28178.1 |
| 485 | MEASLES | PIELQVECFTWDQKL | 1368 | AAR89413.1 |
| | MORBILLIVIRUS | | | |
| 486 | MEASLES VIRUS | PISLERLDVG | 1369 | P26031.1 |
| | STRAIN | | | |
| | EDMONSTON-B | | | |
| 487 | MEASLES VIRUS | PISLERLDVGTNLGN | 1370 | P69353.1 |
| | STRAIN | | | |
| | EDMONSTON | | | |
| 488 | BORDETELLA | PKALFTQQGGAYGRC | 1371 | P04979.1 |
| | PERTUSSIS | | | |
| 489 | MEASLES VIRUS | PKYVATQGYLISNFD | 1372 | P69353.1 |
| | STRAIN | | | |
| | EDMONSTON | | | |
| 490 | MEASLES VIRUS | PLDIDTASESSQD | 1373 | P04851.1 |
| | STRAIN | | | |
| | EDMONSTON | | | |
| 491 | RUBELLA VIRUS | PLGLKFKTVRPVALP | 1374 | BAA28178.1 |
| 492 | MEASLES VIRUS | PLITHGSGMDLYKSN | 1375 | P08362.1 |
| | STRAIN | | | |
| | EDMONSTON | | | |
| 493 | MEASLES | PLKDNRIPSYGVLSV | 1376 | P06830.1 |
| | MORBILLIVIRUS | | | |
| 494 | RUBELLA VIRUS | PLLRTAPG | 1377 | CAJ88851.1 |
| 495 | MEASLES VIRUS | PLLSCKPWQESRK | 1378 | P04851.1 |
| | STRAIN | | | |
| | EDMONSTON | | | |
| 496 | BORDETELLA | PPATVYRYDSRPPE | 1379 | P04977.1 |
| | PERTUSSIS | | | |
| 497 | MEASLES | PPISLERLDVGT | 1380 | AAL29688.1 |
| | MORBILLIVIRUS | | | |
| 498 | RUBELLA VIRUS | PPPPEERQETRSQTPAPKPS | 1381 | P07566.1 |
| 499 | BORDETELLA | PQEQITQHGSPYGRC | 1382 | AAA83981.1 |
| | PERTUSSIS | | | |
| 500 | BORDETELLA | PQEQITQHGSPYGRCANK | 1383 | AAA83981.1 |
| | PERTUSSIS | | | |
| 501 | BORDETELLA | PQPGPQPPQPPQPQPEAPAPQPPAG | 1384 | P14283.3 |
| | PERTUSSIS | | | |
| 502 | MEASLES VIRUS | PRLGGKEDRRVKQ | 1385 | P04851.1 |
| | STRAIN | | | |
| | EDMONSTON | | | |
| 503 | RUBELLA VIRUS | PRLRLVDA | 1386 | CAJ88851.1 |
| 504 | RUBELLA VIRUS | PRNVRVTGCYQCGTP | 1387 | BAA28178.1 |
| 505 | MEASLES VIRUS | PSRASDARAAHLP | 1388 | P04851.1 |
| | STRAIN | | | |
| | EDMONSTON | | | |
| 506 | MEASLES VIRUS | PTGQIHWGNLSKIGV | 1389 | P69353.1 |
| | STRAIN | | | |
| | EDMONSTON | | | |
| 507 | MEASLES VIRUS | PTGTPLDIDTASE | 1390 | P04851.1 |
| | STRAIN | | | |
| | EDMONSTON | | | |
| 508 | MEASLES VIRUS | PTLSEIKGVIVHRLE | 1391 | P69353.1 |
| | STRAIN | | | |
| | EDMONSTON | | | |
| 509 | MEASLES | PTTIRGQFSNMSLSL | 1392 | P06830.1 |
| | MORBILLIVIRUS | | | |
| 510 | MEASLES | PTTRTDDKLR | 1393 | AAR89413.1 |
| | MORBILLIVIRUS | | | |
| 511 | MEASLES | PTTRTDDKLRMETCFQQACKG | 1394 | AAR89413.1 |
| | MORBILLIVIRUS | | | |
| 512 | RUBELLA VIRUS | PVALPRTLAPPRNVR | 1395 | BAA28178.1 |
| 513 | CORYNEBACTERIUM | PVFAGANYAAWAVNVAQVI | 1396 | AAV70486.1 |
| | DIPHTHERIAE | | | |
| 514 | RUBELLA VIRUS | PVIGSQAR | 1397 | CAJ88851.1 |
| 515 | MEASLES | PVVEVNGVTIQVGSR | 1398 | AAL29688.1 |
| | MORBILLIVIRUS | | | |
| 516 | RUBELLA VIRUS | PWELVVLTARPEDGWTCRGV | 1399 | P07566.1 |
| | STRAIN THERIEN | | | |
| 517 | MEASLES VIRUS | PWQESRKNKAQTR | 1400 | P04851.1 |
| | STRAIN | | | |
| | EDMONSTON | | | |
| 518 | MEASLES VIRUS | PYMVNLENSIQNKFS | 1401 | P04851.1 |
| | STRAIN | | | |
| | EDMONSTON | | | |
| 519 | MEASLES VIRUS | PYMVNLENSIQNKFSAGSYP | 1402 | P04851.1 |
| | STRAIN | | | |
| | EDMONSTON | | | |
| 520 | MEASLES VIRUS | PYQGSGKGVS | 1403 | P08362.1 |
| | STRAIN | | | |
| | EDMONSTON | | | |
| 521 | RUBELLA VIRUS | PYQVSCGGESDRASA | 1404 | BAA28178.1 |
| 522 | MEASLES | QACKGKIQALCEN | 1405 | P08362.1 |
| | MORBILLIVIRUS | | | |
| 523 | MEASLES VIRUS | QAGQEMILAVQGVQD | 1406 | P69353.1 |
| | STRAIN | | | |
| | EDMONSTON | | | |
| 524 | MEASLES | QALCENPECVPLKDN | 1407 | P06830.1 |
| | MORBILLIVIRUS | | | |
| 525 | BORDETELLA | QALGALK | 1408 | ACI16088.1 |
| | PERTUSSIS | | | |
| 526 | RUBELLA VIRUS | QAPVPVRLAGVRFES | 1409 | BAA28178.1 |
| 527 | RUBELLA VIRUS | QCGTPALVEGLAPGG | 1410 | BAA28178.1 |
| 528 | MEASLES VIRUS | QDPDKILTYIAADHC | 1411 | P69353.1 |
| | STRAIN | | | |
| | EDMONSTON | | | |
| 529 | MEASLES VIRUS | QECLRGSTKSCARTL | 1412 | P69353.1 |
| | STRAIN | | | |
| | EDMONSTON | | | |
| 530 | BORDETELLA | QEQITQHGSPYGRC | 1413 | AAA83981.1 |
| | PERTUSSIS | | | |
| 531 | MEASLES VIRUS | QESRKNKAQTRTP | 1414 | P04851.1 |
| | STRAIN | | | |
| | EDMONSTON | | | |
| 532 | MEASLES VIRUS | QGDQSENELPRLGGK | 1415 | P04851.1 |
| | STRAIN | | | |
| | EDMONSTON | | | |
| 533 | MEASLES VIRUS | QGDQSENELPRLGGKEDRRV | 1416 | P04851.1 |
| | STRAIN | | | |
| | EDMONSTON | | | |
| 534 | CORYNEBACTERIUM | QGESGHDIKITAENTPLPIA | 1417 | AAV70486.1 |
| | DIPHTHERIAE | | | |
| 535 | MEASLES | QGSGKGVSFQLVKLG | 1418 | P06830.1 |
| | MORBILLIVIRUS | | | |
| 536 | MEASLES VIRUS | QGVQDYINNELIPSM | 1419 | P69353.1 |
| | STRAIN | | | |
| | EDMONSTON | | | |
| 537 | RUBELLA VIRUS | QLEVQVPPDPGDLVE | 1420 | BAA28178.1 |
| 538 | MEASLES | QLPEATFMV | 1421 | ABK40528.1 |
| | MORBILLIVIRUS | | | |
| 539 | RUBELLA VIRUS | QLPFLGHDGHHGGTLRVGQHYRNAS | 1422 | NP_740663.1 |
| 540 | MEASLES VIRUS | QLSMYRVFEV | 1423 | P08362.1 |
| | STRAIN | | | |
| | EDMONSTON | | | |
| 541 | BORDETELLA | QLSNIT | 1424 | ACI16083.1 |
| | PERTUSSIS | | | |
| 542 | MEASLES VIRUS | QNIRPVQSVASSRRH | 1425 | P69353.1 |
| | STRAIN | | | |
| | EDMONSTON | | | |
| 543 | MEASLES VIRUS | QNKFSAGSYPLLWSY | 1426 | P04851.1 |
| | STRAIN | | | |
| | EDMONSTON | | | |
| 544 | MEASLES VIRUS | QNKFSAGSYPLLWSYAMGVG | 1427 | P04851.1 |
| | STRAIN | | | |
| | EDMONSTON | | | |
| 545 | MEASLES VIRUS | QNKFSAGSYPLLWSYAMGVGVELEN | 1428 | P04851.1 |
| | STRAIN | | | |
| | EDMONSTON | | | |
| 546 | MEASLES VIRUS | QQACKGKIQALCENP | 1429 | P08362.1 |
| | STRAIN | | | |
| | EDMONSTON | | | |
| 547 | MEASLES VIRUS | QQRRVVGEFRLERKW | 1430 | P04851.1 |
| | STRAIN | | | |
| | EDMONSTON | | | |
| 548 | MEASLES VIRUS | QQRRVVGEFRLERKWLDVVR | 1431 | P04851.1 |
| | STRAIN | | | |
| | EDMONSTON | | | |
| 549 | BORDETELLA | QQTRANPNPYTSRRSVAS | 1432 | P04977.1 |
| | PERTUSSIS | | | |
| 550 | RUBELLA VIRUS | QRHSPDCSRLVGATP | 1433 | BAA28178.1 |
| 551 | MEASLES VIRUS | QSGLTFASRGTNMED | 1434 | P04851.1 |
| | STRAIN | | | |
| | EDMONSTON | | | |
| 552 | MEASLES VIRUS | QSGLTFASRGTNMEDEADQY | 1435 | P04851.1 |
| | STRAIN | | | |
| | EDMONSTON | | | |
| 553 | CORYNEBACTERIUM | QSIALSSLMVAQAIPLVGEL | 1436 | AAV70486.1 |
| | DIPHTHERIAE | | | |
| 554 | MEASLES VIRUS | QSRFGWFENKEISDI | 1437 | P04851.1 |
| | STRAIN | | | |
| | EDMONSTON | | | |
| 555 | MEASLES VIRUS | QSRFGWFENKEISDIEVQDP | 1438 | P04851.1 |
| | STRAIN | | | |
| | EDMONSTON | | | |
| 556 | MEASLES VIRUS | QSRGEAR | 1439 | P04851.1 |
| | STRAIN | | | |
| | EDMONSTON | | | |
| 557 | MEASLES VIRUS | QSRGEARESYRETGPSRA | 1440 | P04851.1 |
| | STRAIN | | | |
| | EDMONSTON | | | |
| 558 | RUBELLA VIRUS | QTGRGGSAPRPELGPPTN | 1441 | P07566.1 |
| | STRAIN THERIEN | | | |
| 559 | RUBELLA VIRUS | QTPAPKPSRAPPQQPQPPRMQTGRG | 1442 | P07566.1 |
| | STRAIN THERIEN | | | |
| 560 | MEASLES VIRUS | QVGSRRYPDAVYLHR | 1443 | P69353.1 |
| | STRAIN | | | |
| | EDMONSTON | | | |
| 561 | MEASLES VIRUS | QVSFLQGDQSENE | 1444 | P04851.1 |
| | STRAIN | | | |
| | EDMONSTON | | | |
| 562 | RUBELLA VIRUS | QYHPTACEVEPAFGH | 1445 | BAA28178.1 |
| 563 | MEASLES VIRUS | QYVLATYDTSRVEHA | 1446 | P08362.1 |
| | STRAIN | | | |
| | EDMONSTON | | | |
| 564 | BORDETELLA | RANPNPYTSRRSV | 1447 | ACI04548.1 |
| | PERTUSSIS | | | |
| 565 | MEASLES VIRUS | RASDARAAHLPTG | 1448 | P04851.1 |
| | STRAIN | | | |
| | EDMONSTON | | | |
| 566 | MEASLES VIRUS | RASLETTNQAIEAIR | 1449 | P69353.1 |
| | STRAIN | | | |
| | EDMONSTON | | | |
| 567 | RUBELLA VIRUS | RCGRLICGLSTTAQYPPTRF | 1450 | P07566.1 |
| | STRAIN THERIEN | | | |
| 568 | BORDETELLA | RDGQSVIGACASPYEGRYR | 1451 | P04979.1 |
| | PERTUSSIS | | | |
| 569 | MEASLES VIRUS | RESYRETGPSRAS | 1452 | P04851.1 |
| | STRAIN | | | |
| | EDMONSTON | | | |
| 570 | MEASLES VIRUS | RETGPSRASDARA | 1453 | P04851.1 |
| | STRAIN | | | |
| | EDMONSTON | | | |
| 571 | MUMPS | RFAKYQQQGRLEAR | 1454 | P21186.1 |
| | RUBULAVIRUS | | | |
| 572 | RUBELLA VIRUS | RFGAPQAFLAGLLLATVAVGTARA | 1455 | P07566.1 |
| | STRAIN THERIEN | | | |
| 573 | MEASLES VIRUS | RFMVALILDIKRTPG | 1456 | P04851.1 |
| | STRAIN | | | |
| | EDMONSTON | | | |
| 574 | MEASLES VIRUS | RFMVALILDIKRTPGNKPRI | 1457 | P04851.1 |
| | STRAIN | | | |
| | EDMONSTON | | | |
| 575 | MEASLES VIRUS | RGEARESYRETGP | 1458 | P04851.1 |
| | STRAIN | | | |
| | EDMONSTON | | | |
| 576 | RUBELLA VIRUS | RGTTPPAYG | 1459 | CAA28880.1 |
| 577 | RUBELLA VIRUS | RIETRSARH | 1460 | ABD64214.1 |
| | STRAIN M33 | | | |
| 578 | BORDETELLA | RILAGALATYQ | 1461 | P04977.1 |
| | PERTUSSIS | | | |
| 579 | BORDETELLA | RIPPENIRRVT | 1462 | ACI04548.1 |
| | PERTUSSIS | | | |
| 580 | BORDETELLA | RISNLND | 1463 | ACI16083.1 |
| | PERTUSSIS | | | |
| 581 | BORDETELLA | RLANLNG | 1464 | ACI16088.1 |
| | PERTUSSIS | | | |
| 582 | MEASLES VIRUS | RLDVGTNLGNAIAKL | 1465 | P69353.1 |
| | STRAIN | | | |
| | EDMONSTON | | | |
| 583 | MEASLES VIRUS | RLERKWLDV | 1466 | P04851.1 |
| | STRAIN | | | |
| | EDMONSTON | | | |
| 584 | MEASLES VIRUS | RLGGKEDRRVKQSRG | 1467 | P04851.1 |
| | STRAIN | | | |
| | EDMONSTON | | | |
| 585 | MEASLES VIRUS | RLGGKEDRRVKQSRGEARES | 1468 | P04851.1 |
| | STRAIN | | | |
| | EDMONSTON | | | |
| 586 | MEASLES VIRUS | RLLDRLVRL | 1469 | ABI54110.1 |
| | STRAIN | | | |
| | EDMONSTON | | | |
| 587 | RUBELLA VIRUS | RLRLVDAD | 1470 | CAJ88851.1 |
| 588 | RUBELLA VIRUS | RLRLVDADDPLLR | 1471 | BAA19893.1 |
| 589 | RUBELLA VIRUS | RLRLVDADDPLLRTAPGPGEVWVTP | 1472 | BAA19893.1 |
| | | VIGSQA | | |
| 590 | RUBELLA VIRUS | RLRLVQDADDPLLRIAPGPGEVWVTP | 1473 | SRC265968 |
| | | VIGSQA | | |
| 591 | MEASLES VIRUS | RLSDNGYYTV | 1474 | ABK40528.1 |
| | STRAIN | | | |
| | EDMONSTON | | | |
| 592 | RUBELLA VIRUS | RLVDADDP | 1475 | CAJ88851.1 |
| 593 | RUBELLA VIRUS | RLVDADDPLLRTAPG | 1476 | BAA28178.1 |
| 594 | RUBELLA VIRUS | RLVGATPE | 1477 | CAJ88851.1 |
| 595 | RUBELLA VIRUS | RMQTGRGGSAPRPELGPPTNPFQAAVA | 1478 | ABD64216.1 |
| 596 | MEASLES | RMSKGVFKV | 1479 | ABY21184.1 |
| | MORBILLIVIRUS | | | |
| 597 | MEASLES | RNPGLGAPVFHMTNY | 1480 | P06830.1 |
| | MORBILLIVIRUS | | | |
| 598 | RUBELLA VIRUS | RPRLRLVD | 1481 | CAJ88851.1 |
| 599 | BORDETELLA | RQAESSEAMAAWSERAGEA | 1482 | P04977.1 |
| | PERTUSSIS | | | |
| 600 | RUBELLA VIRUS | RQTWAEWAAAHWWQL | 1483 | BAA28178.1 |
| 601 | MEASLES VIRUS | RRVKQSRGEARES | 1484 | P04851.1 |
| | STRAIN | | | |
| | EDMONSTON | | | |
| 602 | MEASLES | RRYPDAVYL | 1485 | ACA09725.1 |
| | MORBILLIVIRUS | | | |
| 603 | MEASLES VIRUS | RRYPDAVYLHRIDLG | 1486 | P69353.1 |
| | STRAIN | | | |
| | EDMONSTON | | | |
| 604 | MEASLES VIRUS | RSAGKVSSTLASELG | 1487 | P04851.1 |
| | STRAIN | | | |
| | EDMONSTON | | | |
| 605 | MEASLES VIRUS | RSAGKVSSTLASELGITAED | 1488 | P04851.1 |
| | STRAIN | | | |
| | EDMONSTON | | | |
| 606 | MEASLES VIRUS | RSELSQLS | 1489 | P08362.1 |
| | STRAIN | | | |
| | EDMONSTON | | | |
| 607 | MEASLES VIRUS | RSELSQLSMYRVFEV | 1490 | P08362.1 |
| | STRAIN | | | |
| | EDMONSTON | | | |
| 608 | RUBELLA VIRUS | RSQTPAPKPSRAPPQQPQPPRMQT | 1491 | ABD64214.1 |
| 609 | RUBELLA VIRUS | RTAPGPGE | 1492 | CAJ88851.1 |
| 610 | RUBELLA VIRUS | RTAPGPGEVWVTPVI | 1493 | BAA28178.1 |
| 611 | MEASLES | RTDDKLRMETCFQQA | 1494 | P06830.1 |
| | MORBILLIVIRUS | | | |
| 612 | RUBELLA VIRUS | RTLAPPRNVRVTGCY | 1495 | BAA28178.1 |
| 613 | MEASLES VIRUS | RTVLEPIRDALNAMT | 1496 | P69353.1 |
| | STRAIN | | | |
| | EDMONSTON | | | |
| 614 | MEASLES VIRUS | RVEHAVVYYVYSPSR | 1497 | P08362.1 |
| | STRAIN | | | |
| | EDMONSTON | | | |
| 615 | MEASLES VIRUS | RVFEVGVIRNPGLGA | 1498 | P08362.1 |
| | STRAIN | | | |
| | EDMONSTON | | | |
| 616 | BORDETELLA | RVHVSKEEQYYDYEDATFE | 1499 | P04978.2 |
| | PERTUSSIS | | | |
| 617 | RUBELLA VIRUS | RVIDPAAQ | 1500 | BAA28178.1 |
| 618 | RUBELLA VIRUS | RVKFHTETRTVWQLS | 1501 | BAA28178.1 |
| 619 | BORDETELLA | RVYHNGITGET | 1502 | ACI04548.1 |
| | PERTUSSIS | | | |
| 620 | BORDETELLA | RYDSRPPEDVF | 1503 | ACI04548.1 |
| | PERTUSSIS | | | |
| 621 | MEASLES VIRUS | RYPDAVYLHRIDLGP | 1504 | P69353.1 |
| | STRAIN | | | |
| | EDMONSTON | | | |
| 622 | MEASLES VIRUS | SAEISIQALSYALGG | 1505 | P69353.1 |
| | STRAIN | | | |
| | EDMONSTON | | | |
| 623 | MEASLES VIRUS | SAEPLLSCKPWQESR | 1506 | P04851.1 |
| | STRAIN | | | |
| | EDMONSTON | | | |
| 624 | MEASLES VIRUS | SAEPLLSCKPWQESRKNKAQ | 1507 | P04851.1 |
| | STRAIN | | | |
| | EDMONSTON | | | |
| 625 | MEASLES | SAGKVSSTLASELG | 1508 | P04851.1 |
| | MORBILLIVIRUS | | | |
| 626 | MEASLES VIRUS | SAGKVSSTLASELGITAEDARLVS | 1509 | P04851.1 |
| | STRAIN | | | |
| | EDMONSTON | | | |
| 627 | MEASLES VIRUS | SCTVTREDGT | 1510 | P08362.1 |
| | STRAIN | | | |
| | EDMONSTON | | | |
| 628 | RUBELLA VIRUS | SDAACWGFPTDTVMS | 1511 | BAA28178.1 |
| 629 | MEASLES VIRUS | SDARAAHLPTGTP | 1512 | P04851.1 |
| | STRAIN | | | |
| | EDMONSTON | | | |
| 630 | RUBELLA VIRUS | SDWHQGTHVCHTKHMDFWCVEHD | 1513 | P07566.1 |
| | STRAIN THERIEN | | | |
| 631 | MEASLES VIRUS | SELRRWIKYTQQRRV | 1514 | P04851.1 |
| | STRAIN | | | |
| | EDMONSTON | | | |
| 632 | MEASLES VIRUS | SELRRWIKYTQQRRVVGEFR | 1515 | P04851.1 |
| | STRAIN | | | |
| | EDMONSTON | | | |
| 633 | MEASLES VIRUS | SELSQL | 1516 | P08362.1 |
| | STRAIN | | | |
| | EDMONSTON | | | |
| 634 | MEASLES VIRUS | SELSQLS | 1517 | P08362.1 |
| | STRAIN | | | |
| | EDMONSTON | | | |
| 635 | BORDETELLA | SEYLAHRRIPPENIRRVTRV | 1518 | CAD44970.1 |
| | PERTUSSIS | | | |
| 636 | MEASLES VIRUS | SFLQGDQSENELP | 1519 | P04851.1 |
| | STRAIN | | | |
| | EDMONSTON | | | |
| 637 | MEASLES VIRUS | SGKGVSFQLVKLGVW | 1520 | P08362.1 |
| | STRAIN | | | |
| | EDMONSTON | | | |
| 638 | MEASLES VIRUS | SHRGVIADNQAKWAV | 1521 | P08362.1 |
| | STRAIN | | | |
| | EDMONSTON | | | |
| 639 | MEASLES VIRUS | SIEHQVKDVLTPLFK | 1522 | P08362.1 |
| | STRAIN | | | |
| | EDMONSTON | | | |
| 640 | MEASLES VIRUS | SKIGVVGIGSASYKV | 1523 | P69353.1 |
| | STRAIN | | | |
| | EDMONSTON | | | |
| 641 | MEASLES | SKRSELSQLSMYRVF | 1524 | P06830.1 |
| | MORBILLIVIRUS | | | |
| 642 | MEASLES | SLFVESPGQLIQRITDDPDVS | 1525 | ABI54110.1 |
| | MORBILLIVIRUS | | | |
| 643 | MEASLES VIRUS | SLSTNLDVTNSIEHQ | 1526 | P08362.1 |
| | STRAIN | | | |
| | EDMONSTON | | | |
| 644 | MEASLES VIRUS | SLSTNLDVTNSIEHQVKDVLTPLFK | 1527 | P08362.1 |
| | STRAIN | | | |
| | EDMONSTON | | | |
| 645 | MEASLES VIRUS | SLWGSGLLML | 1528 | BAE98296.1 |
| | STRAIN | | | |
| | EDMONSTON | | | |
| 646 | MEASLES VIRUS | SMKGLSSTSIVYILI | 1529 | P69353.1 |
| | STRAIN | | | |
| | EDMONSTON | | | |
| 647 | MEASLES | SMYRVFEVGV | 1530 | P08362.1 |
| | MORBILLIVIRUS | | | |
| 648 | MEASLES | SNDLSNCMVALGELK | 1531 | P06830.1 |
| | MORBILLIVIRUS | | | |
| 649 | MEASLES VIRUS | SPGQLIQR | 1532 | P10050.1 |
| | STRAIN HALLE | | | |
| 650 | MEASLES VIRUS | SQDPQDSRRSAEP | 1533 | P04851.1 |
| | STRAIN | | | |
| | EDMONSTON | | | |
| 651 | MEASLES | SRIVINREHLMIDRP | 1534 | P06830.1 |
| | MORBILLIVIRUS | | | |
| 652 | MEASLES VIRUS | SRKNKAQTRTPLQ | 1535 | P04851.1 |
| | STRAIN | | | |
| | EDMONSTON | | | |
| 653 | RUBELLA VIRUS | SRLVGATP | 1536 | CAJ88851.1 |
| 654 | RUBELLA VIRUS | SRLVGATPERPRLRLVDADDPLLR | 1537 | CAJ88851.1 |
| 655 | MEASLES VIRUS | SRPGLKPDLTGTSKS | 1538 | P69353.1 |
| | STRAIN | | | |
| | EDMONSTON | | | |
| 656 | BORDETELLA | SRRSVASIVGTLVRM | 1539 | CAD44970.1 |
| | PERTUSSIS | | | |
| 657 | RUBELLA VIRUS | SRWGLGSPNCHGPDW | 1540 | BAA28178.1 |
| 658 | BORDETELLA | SSATK | 1541 | ACI16088.1 |
| | PERTUSSIS | | | |
| 659 | RUBELLA VIRUS | SSGGYAQLASYFNPG | 1542 | BAA28178.1 |
| 660 | BORDETELLA | SSLGNGV | 1543 | ACI16083.1 |
| | PERTUSSIS | | | |
| 661 | MEASLES | SSNLVILPGQDLQYV | 1544 | P06830.1 |
| | MORBILLIVIRUS | | | |
| 662 | MEASLES VIRUS | SSQDPQDSRRSAEPL | 1545 | P04851.1 |
| | STRAIN | | | |
| | EDMONSTON | | | |
| 663 | MEASLES VIRUS | SSQDPQDSRRSAEPLLSCKP | 1546 | P04851.1 |
| | STRAIN | | | |
| | EDMONSTON | | | |
| 664 | MEASLES VIRUS | SSRRHKRFAGVVLAG | 1547 | P69353.1 |
| | STRAIN | | | |
| | EDMONSTON | | | |
| 665 | MEASLES VIRUS | SSTSIVYILIAVCLG | 1548 | P69353.1 |
| | STRAIN | | | |
| | EDMONSTON | | | |
| 666 | BORDETELLA | STPGIVI | 1549 | AAA83981.1 |
| | PERTUSSIS | | | |
| 667 | BORDETELLA | STPGIVIPPQEQITQHGSPYGRC | 1550 | AAA83981.1 |
| | PERTUSSIS | | | |
| 668 | BORDETELLA | STSSSRRYTEVY | 1551 | P04977.1 |
| | PERTUSSIS | | | |
| 669 | MEASLES VIRUS | SYFIVLSIAYPTLSE | 1552 | P69353.1 |
| | STRAIN | | | |
| | EDMONSTON | | | |
| 670 | MEASLES VIRUS | SYRETGPSRASDA | 1553 | P04851.1 |
| | STRAIN | | | |
| | EDMONSTON | | | |
| 671 | BORDETELLA | SYVK | 1554 | ACI16083.1 |
| | PERTUSSIS | | | |
| 672 | RUBELLA VIRUS | SYVQHPHKTVRVKFH | 1555 | BAA28178.1 |
| 673 | RUBELLA VIRUS | TAPGPGEV | 1556 | CAJ88851.1 |
| 674 | BORDETELLA | TATRLLSSTNSRLC | 1557 | AAA83981.1 |
| | PERTUSSIS | | | |
| 675 | MEASLES | TDDPVIDRLYLSSHR | 1558 | P06830.1 |
| | MORBILLIVIRUS | | | |
| 676 | MEASLES VIRUS | TEILSLFGPSLRDPI | 1559 | P69353.1 |
| | STRAIN | | | |
| | EDMONSTON | | | |
| 677 | RUBELLA VIRUS | TETRTVWQLSVAGVS | 1560 | BAA28178.1 |
| 678 | BORDETELLA | TEVYLEHRMQEAVE | 1561 | P04977.1 |
| | PERTUSSIS | | | |
| 679 | MEASLES VIRUS | TFMPEGTVCSQNALY | 1562 | P69353.1 |
| | STRAIN | | | |
| | EDMONSTON | | | |
| 680 | RUBELLA VIRUS | TGACICEIPTDVSCE | 1563 | BAA28178.1 |
| 681 | BORDETELLA | TGDLRAY | 1564 | ACI16083.1 |
| | PERTUSSIS | | | |
| 682 | MEASLES | TGMQSWVPLSTDDPV | 1565 | P06830.1 |
| | MORBILLIVIRUS | | | |
| 683 | RUBELLA VIRUS | TGNQQSRWGLGSPNC | 1566 | BAA28178.1 |
| 684 | MEASLES VIRUS | TGPSRASDARAAH | 1567 | P04851.1 |
| | STRAIN | | | |
| | EDMONSTON | | | |
| 685 | MEASLES | TGTIINQDPDKILTY | 1568 | AAF02706.1 |
| | MORBILLIVIRUS | | | |
| 686 | RUBELLA VIRUS | TGVVYGTHTTAVSET | 1569 | BAA28178.1 |
| 687 | MEASLES VIRUS | TIRGQFSNMSLSLLD | 1570 | P08362.1 |
| | STRAIN | | | |
| | EDMONSTON | | | |
| 688 | RUBELLA VIRUS | TLGATCALPLAGLLA | 1571 | BAA28178.1 |
| 689 | MEASLES | TLLNNCTRV | 1572 | P26031.1 |
| | MORBILLIVIRUS | | | |
| 690 | MEASLES VIRUS | TLNVPPPPDPGR | 1573 | P03422.1 |
| | STRAIN | | | |
| | EDMONSTON-B | | | |
| 691 | MEASLES VIRUS | TLNVPPPPDPGRASTSGTPIKK | 1574 | P03422.1 |
| | STRAIN | | | |
| | EDMONSTON-B | | | |
| 692 | MEASLES | TMTSQGMYGGTYPVE | 1575 | P06830.1 |
| | MORBILLIVIRUS | | | |
| 693 | MEASLES VIRUS | TNLGNAIAKLEDAKE | 1576 | P69353.1 |
| | STRAIN | | | |
| | EDMONSTON | | | |
| 694 | MEASLES VIRUS | TNMEDEADQYFSHDD | 1577 | P04851.1 |
| | STRAIN | | | |
| | EDMONSTON | | | |
| 695 | MEASLES VIRUS | TNMEDEADQYFSHDDPISSD | 1578 | P04851.1 |
| | STRAIN | | | |
| | EDMONSTON | | | |
| 696 | RUBELLA VIRUS | TNPFQAAVARGLRPP | 1579 | CAA28880.1 |
| | STRAIN M33 | | | |
| 697 | MEASLES | TNSIEHQVKDVLTPL | 1580 | P06830.1 |
| | MORBILLIVIRUS | | | |
| 698 | MEASLES VIRUS | TNYLEQPVSNDLSNC | 1581 | P08362.1 |
| | STRAIN | | | |
| | EDMONSTON | | | |
| 699 | MEASLES | TNYLEQPVSNDLSNCMVALGELKLA | 1582 | AAR89413.1 |
| | MORBILLIVIRUS | AL | | |
| 700 | RUBELLA VIRUS | TPERPRLR | 1583 | CAJ88851.1 |
| 701 | RUBELLA VIRUS | TPERPRLRLVDADDPLLRTA | 1584 | P07566.1 |
| | STRAIN THERIEN | | | |
| 702 | MEASLES VIRUS | TPGNKPRIA | 1585 | P10050.1 |
| | STRAIN HALLE | | | |
| 703 | MEASLES VIRUS | TPLDIDTASESSQDP | 1586 | P04851.1 |
| | STRAIN | | | |
| | EDMONSTON | | | |
| 704 | MEASLES VIRUS | TPLDIDTASESSQDPQDSRR | 1587 | P04851.1 |
| | STRAIN | | | |
| | EDMONSTON | | | |
| 705 | MEASLES VIRUS | TPLFKIIGDEVGLRT | 1588 | P08362.1 |
| | STRAIN | | | |
| | EDMONSTON | | | |
| 706 | MEASLES VIRUS | TPLQCTM | 1589 | P04851.1 |
| | STRAIN | | | |
| | EDMONSTON | | | |
| 707 | RUBELLA VIRUS | TPVIGSQA | 1590 | CAJ88851.1 |
| 708 | RUBELLA VIRUS | TPVIGSQARK | 1591 | BAA19893.1 |
| 709 | MEASLES VIRUS | TQGYLISNFDESSCT | 1592 | P69353.1 |
| | STRAIN | | | |
| | EDMONSTON | | | |
| 710 | BORDETELLA | TRANPNPYTSRRSVASIVGTLVRM | 1593 | P04977.1 |
| | PERTUSSIS | | | |
| 711 | RUBELLA VIRUS | TRFGCAMRWGLPP | 1594 | NP_740663.1 |
| 712 | BORDETELLA | TRNTGQPATDHYYSNV | 1595 | AAA83981.1 |
| | PERTUSSIS | | | |
| 713 | MEASLES VIRUS | TRTPLQCTMTEIF | 1596 | P04851.1 |
| | STRAIN | | | |
| | EDMONSTON | | | |
| 714 | RUBELLA VIRUS | TRWHRLLRMPVR | 1597 | ABD64216.1 |
| 715 | MEASLES VIRUS | TSGSGGAIRGIKHII | 1598 | P04851.1 |
| | STRAIN | | | |
| | EDMONSTON | | | |
| 716 | MEASLES VIRUS | TSGSGGAIRGIKHIIIVPIP | 1599 | P04851.1 |
| | STRAIN | | | |
| | EDMONSTON | | | |
| 717 | MEASLES VIRUS | TSQGMYGGTYLVEKP | 1600 | P08362.1 |
| | STRAIN | | | |
| | EDMONSTON | | | |
| 718 | MEASLES | TSRVEHAVVYYVYSP | 1601 | P06830.1 |
| | MORBILLIVIRUS | | | |
| 719 | BORDETELLA | TSSSRRYTEVYL | 1602 | ACI04548.1 |
| | PERTUSSIS | | | |
| 720 | BORDETELLA | TSYVG | 1603 | ACI16088.1 |
| | PERTUSSIS | | | |
| 721 | MEASLES VIRUS | TTEDKISRAVGPRQA | 1604 | P04851.1 |
| | STRAIN | | | |
| | EDMONSTON | | | |
| 722 | MEASLES VIRUS | TTEDKISRAVGPRQAQVSFL | 1605 | P04851.1 |
| | STRAIN | | | |
| | EDMONSTON | | | |
| 723 | RUBELLA VIRUS | TTERIETRSARHP | 1606 | ABD64214.1 |
| | STRAIN M33 | | | |
| 724 | MEASLES VIRUS | TTNQAIEAIRQAGQE | 1607 | P69353.1 |
| | STRAIN | | | |
| | EDMONSTON | | | |
| 725 | RUBELLA VIRUS | TTSDPWHPPGPLGLK | 1608 | BAA28178.1 |
| 726 | MEASLES VIRUS | TVCSQNALYPMSPLL | 1609 | P69353.1 |
| | STRAIN | | | |
| | EDMONSTON | | | |
| 727 | RUBELLA VIRUS | TVNGEDVGAVPPGKF | 1610 | BAA28178.1 |
| 728 | MEASLES | TYPVEKPNLSSKRSE | 1611 | P06830.1 |
| | MORBILLIVIRUS | | | |
| 729 | RUBELLA VIRUS | VAGVSCNVTTEHPFC | 1612 | BAA28178.1 |
| 730 | BORDETELLA | VAPGIVIPPKALFTQQGGAYGRC | 1613 | P04979.1 |
| | PERTUSSIS | | | |
| 731 | RUBELLA VIRUS | VCHTKHMDFWCVEHDRPPPATPTPL | 1614 | NP_740663.1 |
| 732 | RUBELLA VIRUS | VCQRHSPDCSRLVGATPER | 1615 | BAA19893.1 |
| 733 | RUBELLA VIRUS | VDADDPLL | 1616 | CAJ88851.1 |
| 734 | RUBELLA VIRUS | VDADDPLLRTAPGPGEVWVT | 1617 | BAA19893.1 |
| 735 | CORYNEBACTERIUM | VDIGFAAYNFVESIINLFQV | 1618 | AAV70486.1 |
| | DIPHTHERIAE | | | |
| 736 | MEASLES VIRUS | VEIAEYRRLLRTVLE | 1619 | P69353.1 |
| | STRAIN | | | |
| | EDMONSTON | | | |
| 737 | MEASLES VIRUS | VELENSMGGLNFGRS | 1620 | P04851.1 |
| | STRAIN | | | |
| | EDMONSTON | | | |
| 738 | MEASLES VIRUS | VELENSMGGLNFGRSYFDPA | 1621 | P04851.1 |
| | STRAIN | | | |
| | EDMONSTON | | | |
| 739 | MEASLES | VELKIKIASGFGPLI | 1622 | P06830.1 |
| | MORBILLIVIRUS | | | |
| 740 | RUBELLA VIRUS | VEMDEWIHAHTTSD | 1623 | SRC265968 |
| 741 | RUBELLA VIRUS | VEMPEWIHAHTTSDP | 1624 | BAA28178.1 |
| 742 | CORYNEBACTERIUM | VERRLVKVL | 1625 | P33120.2 |
| | DIPHTHERIAE | | | |
| 743 | MEASLES | VESPGQLI | 1626 | ABI54110.1 |
| | MORBILLIVIRUS | | | |
| 744 | MEASLES VIRUS | VESPGQLIQRITDDP | 1627 | P04851.1 |
| | STRAIN | | | |
| | EDMONSTON | | | |
| 745 | MEASLES VIRUS | VESPGQLIQRITDDPDVSIR | 1628 | P04851.1 |
| | STRAIN | | | |
| | EDMONSTON | | | |
| 746 | RUBELLA VIRUS | VFALASYVQHPHKTV | 1629 | BAA28178.1 |
| 747 | RUBELLA VIRUS | VGATPERP | 1630 | CAJ88851.1 |
| 748 | RUBELLA VIRUS | VGATPERPRL | 1631 | BAA19893.1 |
| 749 | RUBELLA VIRUS | VGATPERPRLRLVDA | 1632 | BAA28178.1 |
| 750 | MEASLES VIRUS | VGIGSASYKVMTRSS | 1633 | P69353.1 |
| | STRAIN | | | |
| | EDMONSTON | | | |
| 751 | MEASLES VIRUS | VGLRTPQRFTDLVKF | 1634 | P08362.1 |
| | STRAIN | | | |
| | EDMONSTON | | | |
| 752 | CORYNEBACTERIUM | VHHNTEEIVAQSIALSSLMV | 1635 | AAV70486.1 |
| | DIPHTHERIAE | | | |
| 753 | MEASLES VIRUS | VHRLEGVSYNIGSQE | 1636 | P69353.1 |
| | STRAIN | | | |
| | EDMONSTON | | | |
| 754 | RUBELLA VIRUS | VIGSQARK | 1637 | CAJ88851.1 |
| 755 | BORDETELLA | VITGSI | 1638 | ACI16088.1 |
| | PERTUSSIS | | | |
| 756 | BORDETELLA | VITGTI | 1639 | ACI16083.1 |
| | PERTUSSIS | | | |
| 757 | MEASLES VIRUS | VKQSRGEA | 1640 | P04851.1 |
| | STRAIN | | | |
| | EDMONSTON | | | |
| 758 | MEASLES VIRUS | VLFVMFLSLI | 1641 | P08362.1 |
| | STRAIN | | | |
| | EDMONSTON | | | |
| 759 | MEASLES | VLFVMFLSLIGLLAI | 1642 | P06830.1 |
| | MORBILLIVIRUS | | | |
| 760 | MEASLES | VLTPLFKIIGDEVGL | 1643 | P06830.1 |
| | MORBILLIVIRUS | | | |
| 761 | MEASLES VIRUS | VMTRSSHQSLVIKLM | 1644 | P69353.1 |
| | STRAIN | | | |
| | EDMONSTON | | | |
| 762 | RUBELLA VIRUS | VPAAPCARIWNGTQR | 1645 | BAA28178.1 |
| 763 | RUBELLA VIRUS | VPPDPGDLVEYIMNY | 1646 | BAA28178.1 |
| 764 | MEASLES VIRUS | VQSVASSRRHKRFAG | 1647 | P69353.1 |
| | STRAIN | | | |
| | EDMONSTON | | | |
| 765 | BORDETELLA | VQTGGTSRTVTMRYLAS | 1648 | ACI16083.1 |
| | PERTUSSIS | | | |
| 766 | BORDETELLA | VQVRI | 1649 | ACI16083.1 |
| | PERTUSSIS | | | |
| 767 | RUBELLA VIRUS | VRAYNQPAGDV | 1650 | NP_740662.1 |
| 768 | RUBELLA VIRUS | VRFESKIVDGGCFAP | 1651 | BAA28178.1 |
| 769 | RUBELLA VIRUS | VRLAGVRFESKIVDG | 1652 | BAA28178.1 |
| 770 | MEASLES VIRUS | VSGSFGNRFILSQGN | 1653 | P69353.1 |
| | STRAIN | | | |
| | EDMONSTON | | | |
| 771 | BORDETELLA | VSKEEQYYDYEDAT | 1654 | AAA83981.1 |
| | PERTUSSIS | | | |
| 772 | MEASLES VIRUS | VSKGNCSGPTTIRGQ | 1655 | P08362.1 |
| | STRAIN | | | |
| | EDMONSTON | | | |
| 773 | RUBELLA VIRUS | VTAALLNTPPPYQVS | 1656 | BAA28178.1 |
| 774 | RUBELLA VIRUS | VTGCYQCGTPALVEG | 1657 | BAA28178.1 |
| 775 | RUBELLA VIRUS | VTPVIGSQ | 1658 | CAJ88851.1 |
| 776 | RUBELLA VIRUS | VTTEHPFCNTPHGQLEVQVPPD | 1659 | P07566.1 |
| | STRAIN THERIEN | | | |
| 777 | MEASLES VIRUS | VVLAGAALGVATAAQ | 1660 | P69353.1 |
| | STRAIN | | | |
| | EDMONSTON | | | |
| 778 | RUBELLA VIRUS | VWQLSVAGVSCNVTT | 1661 | BAA28178.1 |
| 779 | RUBELLA VIRUS | VWVTPVIG | 1662 | CAJ88851.1 |
| 780 | RUBELLA VIRUS | VWVTPVIGSQAR | 1663 | BAA19893.1 |
| 781 | MEASLES VIRUS | VYILIAVCLGGLIGI | 1664 | P69353.1 |
| | STRAIN | | | |
| | EDMONSTON | | | |
| 782 | MEASLES VIRUS | VYLHRIDLGPPISLE | 1665 | P69353.1 |
| | STRAIN | | | |
| | EDMONSTON | | | |
| 783 | BORDETELLA | VYRYDSRP | 1666 | P04977.1 |
| | PERTUSSIS | | | |
| 784 | BORDETELLA | VYRYDSRPPEDV | 1667 | P04977.1 |
| | PERTUSSIS | | | |
| 785 | MEASLES | VYWLTIPPMKNLALG | 1668 | P06830.1 |
| | MORBILLIVIRUS | | | |
| 786 | RUBELLA VIRUS | WDLEATGACICEIPT | 1669 | BAA28178.1 |
| 787 | MEASLES | WDQKLWCRHFCVLAD | 1670 | AAR89413.1 |
| | MORBILLIVIRUS | | | |
| 788 | RUBELLA VIRUS | WGFPTDTVMSVFALA | 1671 | BAA28178.1 |
| 789 | RUBELLA VIRUS | WHPPGPLGLKFKTVR | 1672 | BAA28178.1 |
| 790 | RUBELLA VIRUS | WIHAHTTSDPWHPPG | 1673 | BAA28178.1 |
| 791 | MEASLES VIRUS | WLTIPPMKNLALGVI | 1674 | P08362.1 |
| | STRAIN | | | |
| | EDMONSTON | | | |
| 792 | MEASLES VIRUS | WQESRKNKAQTRTPLQCTMT | 1675 | P04851.1 |
| | STRAIN | | | |
| | EDMONSTON | | | |
| 793 | RUBELLA VIRUS | WVCIFMVCRRACR | 1676 | SRC265968 |
| 794 | RUBELLA VIRUS | WVTPVIGS | 1677 | CAJ88851.1 |
| 795 | MEASLES VIRUS | WYTTVPKYVATQGYL | 1678 | P69353.1 |
| | STRAIN | | | |
| | EDMONSTON | | | |
| 796 | MEASLES VIRUS | YALGGDINKVLEKLG | 1679 | P69353.1 |
| | STRAIN | | | |
| | EDMONSTON | | | |
| 797 | MEASLES VIRUS | YAMGVGVELE | 1680 | P04851.1 |
| | STRAIN | | | |
| | EDMONSTON | | | |
| 798 | MEASLES | YAMGVGVELEN | 1681 | ABI54110.1 |
| | MORBILLIVIRUS | | | |
| 799 | MEASLES | YCADVAAEELMNALV | 1682 | AAR89413.1 |
| | MORBILLIVIRUS | | | |
| 800 | MEASLES | YDFRDLTWCINPPER | 1683 | P06830.1 |
| | MORBILLIVIRUS | | | |
| 801 | BORDETELLA | YFEPGPT | 1684 | ACI16083.1 |
| | PERTUSSIS | | | |
| 802 | RUBELLA VIRUS | YFNPGGSYYKQYHPT | 1685 | BAA28178.1 |
| 803 | MEASLES VIRUS | YFRLGQEMVRRSAGK | 1686 | P04851.1 |
| | STRAIN | | | |
| | EDMONSTON | | | |
| 804 | MEASLES VIRUS | YFRLGQEMVRRSAGKVSSTL | 1687 | P04851.1 |
| | STRAIN | | | |
| | EDMONSTON | | | |
| 805 | MEASLES | YFYPFRLPIKGVPIE | 1688 | P06830.1 |
| | MORBILLIVIRUS | | | |
| 806 | BORDETELLA | YGDNAGRILAGALAT | 1689 | P04977.1 |
| | PERTUSSIS | | | |
| 807 | RUBELLA VIRUS | YGHATVEMPEWIHAH | 1690 | BAA28178.1 |
| 808 | RUBELLA VIRUS | YIMNYTGNQQSRWGL | 1691 | BAA28178.1 |
| 809 | MEASLES VIRUS | YINNELIPSMNQLSC | 1692 | P69353.1 |
| | STRAIN | | | |
| | EDMONSTON | | | |
| 810 | RUBELLA VIRUS | YLCTAPGCATQAPVP | 1693 | BAA28178.1 |
| 811 | MEASLES | YLFTVPIKEAGEDCH | 1694 | P06830.1 |
| | MORBILLIVIRUS | | | |
| 812 | MEASLES VIRUS | YLHDPEFNL | 1695 | ABK40531.1 |
| | STRAIN | | | |
| | EDMONSTON | | | |
| 813 | MEASLES VIRUS | YLNMSRLFV | 1696 | ABK40531.1 |
| | STRAIN | | | |
| | EDMONSTON | | | |
| 814 | MEASLES VIRUS | YPALGLHEF | 1697 | P10050.1 |
| | STRAIN HALLE | | | |
| 815 | MEASLES | YPALGLHEFA | 1698 | ABI54110.1 |
| | MORBILLIVIRUS | | | |
| 816 | MEASLES VIRUS | YPALGLHEFAGELST | 1699 | P04851.1 |
| | STRAIN | | | |
| | EDMONSTON | | | |
| 817 | MEASLES VIRUS | YPALGLHEFAGELSTLESLM | 1700 | P04851.1 |
| | STRAIN | | | |
| | EDMONSTON | | | |
| 818 | MEASLES VIRUS | YPFRLPIKGVPIELQ | 1701 | P08362.1 |
| | STRAIN | | | |
| | EDMONSTON | | | |
| 819 | MEASLES VIRUS | YPLLWSYAM | 1702 | P10050.1 |
| | STRAIN HALLE | | | |
| 820 | MUMPS | YQQQGRL | 1703 | P21186.1 |
| | RUBULAVIRUS | | | |
| 821 | BORDETELLA | YQSEYLAHRR | 1704 | P04977.1 |
| | PERTUSSIS | | | |
| 822 | MEASLES VIRUS | YRETGPSRASDARAA | 1705 | P04851.1 |
| | STRAIN | | | |
| | EDMONSTON | | | |
| 823 | MEASLES VIRUS | YRETGPSRASDARAAHLPTG | 1706 | P04851.1 |
| | STRAIN | | | |
| | EDMONSTON | | | |
| 824 | RUBELLA VIRUS | YRNASDVLPGHWLQGGWGCYNLSDW | 1707 | NP_740663.1 |
| 825 | MEASLES VIRUS | YRRLLRTVLEPIRDA | 1708 | P69353.1 |
| | STRAIN | | | |
| | EDMONSTON | | | |
| 826 | BORDETELLA | YRYDSRPP | 1709 | P04977.1 |
| | PERTUSSIS | | | |
| 827 | MEASLES VIRUS | YSGGDLLGILESRGI | 1710 | P69353.1 |
| | STRAIN | | | |
| | EDMONSTON | | | |
| 828 | BORDETELLA | YSKVTATBLLASTNSRLCAVFVRDG | 1711 | SRC280066 |
| | PERTUSSIS | | | |
| 829 | MEASLES VIRUS | YSPSRSFSYFYPFRL | 1712 | P08362.1 |
| | STRAIN | | | |
| | EDMONSTON | | | |
| 830 | RUBELLA VIRUS | YTGNQQSRWGLGSPNCHGPDWASPV | 1713 | P07566.1 |
| | STRAIN THERIEN | | | |
| 831 | MEASLES | YVLLAVLFV | 1714 | P08362.1 |
| | MORBILLIVIRUS | | | |
| 832 | MEASLES | YVYSPGRSFSYFYPF | 1715 | P06830.1 |
| | MORBILLIVIRUS | | | |
| 833 | BORDETELLA | YYDYEDATFQTYALTGISLCNPAASIC | 1716 | P04979.1 |
| | PERTUSSIS | | | |
| 834 | MEASLES | GDLLGILESRGIKAR | 1717 | AAF02706.1 |
| | MORBILLIVIRUS | | | |
| 835 | MEASLES | TVPKYVATQGYLISN | 1718 | AAL29688.1 |
| | MORBILLIVIRUS | | | |
| 836 | MEASLES | KPWDSPQEI | 1719 | P26035.1 |
| | MORBILLIVIRUS | | | |
| 837 | MEASLES | KPWESPQEI | 1720 | CAA34579.1 |
| | MORBILLIVIRUS | | | |
| 838 | BORDETELLA | ATYQSEYLAHRRIPP | 1721 | ACI04548.1 |
| | PERTUSSIS | | | |
| 839 | BORDETELLA | CMARQAESSEAMAAWSERAGEAMV | 1722 | ACI04548.1 |
| | PERTUSSIS | LVYYESIAYSF | | |
| 840 | BORDETELLA | CQVGSSNSAFVSTSSSRRYTEVYL | 1723 | ACI04548.1 |
| | PERTUSSIS | | | |
| 841 | BORDETELLA | DDPPATVYRYDSRPP | 1724 | ACI04548.1 |
| | PERTUSSIS | | | |
| 842 | BORDETELLA | GALATYQSEYLAHRRIPP | 1725 | ACI04548.1 |
| | PERTUSSIS | | | |
| 843 | BORDETELLA | MAAWSERAGEAMVLVYYESIAYSF | 1726 | ACI04548.1 |
| | PERTUSSIS | | | |
| 844 | BORDETELLA | MVLVYYESIAYSF | 1727 | ACI04548.1 |
| | PERTUSSIS | | | |
| 845 | BORDETELLA | PATVYRYDSRPPEDV | 1728 | ACI04548.1 |
| | PERTUSSIS | | | |
| 846 | BORDETELLA | YDSRPPEDV | 1729 | ACI04548.1 |
| | PERTUSSIS | | | |
| 847 | BORDETELLA | EPGITTNYDT | 1730 | ACI16087.1 |
| | PERTUSSIS | | | |
| 848 | BORDETELLA | GDLRAYKMVYATNPQTQLSN | 1731 | ACI16083.1 |
| | PERTUSSIS | | | |
| 849 | BORDETELLA | KNGDVEASAITTYVGFSVVYP | 1732 | ACI16083.1 |
| | PERTUSSIS | | | |
| 850 | BORDETELLA | KVTNGSKSYTLRYLASYVK | 1733 | ACI16088.1 |
| | PERTUSSIS | | | |
| 851 | BORDETELLA | QALGALKLYFEPGITTNYDTGDLIAY | 1734 | ACI16088.1 |
| | PERTUSSIS | KQTYNASGN | | |
| 852 | BORDETELLA | YATNPQTQLS | 1735 | ACI16083.1 |
| | PERTUSSIS | | | |
| 853 | CORYNEBACTERIUM | DNENPLSGKAGGVVKVTYPGLTKV | 1736 | AAV70486.1 |
| | DIPHTHERIAE | | | |
| 854 | CORYNEBACTERIUM | ENFSSYHGTKPGYVDSI | 1737 | AAV70486.1 |
| | DIPHTHERIAE | | | |
| 855 | CORYNEBACTERIUM | KVDNAETIKKELGLSLTEP | 1738 | AAV70486.1 |
| | DIPHTHERIAE | | | |
| 856 | RUBELLA VIRUS | MEDLQKALEAQSRALRAGLAA | 1739 | CAA28880.1 |
| | STRAIN M33 | | | |
| 857 | CORYNEBACTERIUM | QKGIQKPKSGTQGNYDDDWKGFY | 1740 | AAV70486.1 |
| | DIPHTHERIAE | | | |
| 858 | RUBELLA VIRUS | RTGAWQRKDWSRAPPPPEERQESRS | 1741 | CAA28880.1 |
| | STRAIN M33 | QTPAPKPSR | | |
| 859 | RUBELLA VIRUS | AAGASQSRRPRPPRHARAQHLPEMT | 1742 | SRC265968 |
| | | PAVT | | |
| 860 | RUBELLA VIRUS | CVTSWLWSEGEGAVFYRVDLHFINL | 1743 | CAA28880.1 |
| | | GTP | | |
| 861 | RUBELLA VIRUS | FRVGGTRWHRLLRMPVRGLDGDTAP | 1744 | CAA28880.1 |
| | | LP | | |
| 862 | CORYNEBACTERIUM | GRKIRMRCRAIDGDVTFCRPKSPVYV | 1745 | 1007216A |
| | DIPHTHERIAE | GN | | |
| 863 | RUBELLA VIRUS | GTPPLDEDGRWDPALMYNPCGPEPPA | 1746 | CAA28880.1 |
| | | HV | | |
| 864 | CORYNEBACTERIUM | GVHANLHVAFHRSSSEKIHSNEISSDS | 1747 | AAV70486.1 |
| | DIPHTHERIAE | IGVLGYQKTVDHTKVNSKLSLFFEIKS | | |
| 865 | RUBELLA VIRUS | MASTTPITMEDLQKALEAQSRALRA | 1748 | ABD64200.1 |
| | | GLAAG | | |
| 866 | RUBELLA VIRUS | PELGPPTNPFQAAVARGLRPPLHDPD | 1749 | CAA28880.1 |
| | | TEAPTEAC | | |
| 867 | RUBELLA VIRUS | PLPPHTTERIETRSARHPWRIRFGAP | 1750 | CAA28880.1 |
| 868 | RUBELLA VIRUS | SRAPPPPEERQESRSQTPAPKPSRAPP | 1751 | CAA28880.1 |
| 869 | RUBELLA VIRUS | SRAPPQQPQPPRMQTGRGGSAPRPEL | 1752 | CAA28880.1 |
| | | GP | | |
| 870 | RUBELLA VIRUS | TPAVTPEGPAPPRTGAWQRKDWSRAPP | 1753 | CAA28880.1 |
| 871 | RUBELLA VIRUS | VRAYNQPAGDVRGVWGKGERTYAE | 1754 | CAA28880.1 |
| | | QDFRV | | |
| 872 | RUBELLA VIRUS | AFGHSDAACWGFPTDTVMSV | 1755 | CAA28880.1 |
| 873 | RUBELLA VIRUS | CARIWNGTQRACTFWAVNAYS | 1756 | CAA28880.1 |
| 874 | RUBELLA VIRUS | EEAFTYLCTAPGCATQTPVPVR | 1757 | CAA28880.1 |
| 875 | RUBELLA VIRUS | FAPWDLEATGACICEIPTDV | 1758 | CAA28880.1 |
| 876 | RUBELLA VIRUS | GEDVGAFPPGKFVTAAL | 1759 | CAA28880.1 |
| 877 | RUBELLA VIRUS | GEVWVTPVIGSQARKCGLHI | 1760 | CAA28880.1 |
| 878 | RUBELLA VIRUS | GQLEVQVPPDPGDLVEYIMN | 1761 | CAA28880.1 |
| 879 | RUBELLA VIRUS | GSYYKQYHPTACEVEPAFGH | 1762 | CAA28880.1 |
| 880 | RUBELLA VIRUS | IHAHTTSDPWHPPGPLGLKF | 1763 | CAA28880.1 |
| 881 | RUBELLA VIRUS | IMNYTGNQQSRWGLGSPNCH | 1764 | CAA28880.1 |
| 882 | RUBELLA VIRUS | LHIRAGPYGHATVEMPEWIH | 1765 | CAA28880.1 |
| 883 | RUBELLA VIRUS | LKFKTVRPVALPRALAPPRN | 1766 | CAA28880.1 |
| 884 | RUBELLA VIRUS | LNTPPPYQVSCGGESDRASAGH | 1767 | CAA28880.1 |
| 885 | RUBELLA VIRUS | NCHGPDWASPVCQRHSPDCS | 1768 | CAA28880.1 |
| 886 | RUBELLA VIRUS | PDCSRLVGATPERPRLRLVD | 1769 | CAA28880.1 |
| 887 | RUBELLA VIRUS | PRNVRVTGCYQCGTPALVEG | 1770 | CAA28880.1 |
| 888 | RUBELLA VIRUS | PTDVSCEGLGAWVPTAPCARI | 1771 | CAA28880.1 |
| 889 | RUBELLA VIRUS | RLVDADDPLLRTAPGPGEVW | 1772 | CAA28880.1 |
| 890 | RUBELLA VIRUS | SVFALASYVQHPHKTVRVKF | 1773 | CAA28880.1 |
| 891 | RUBELLA VIRUS | VEGLAPGGGNCHLTVNGEDV | 1774 | CAA28880.1 |
| 892 | RUBELLA VIRUS | VKFHTETRTVWQLSVAGVSC | 1775 | CAA28880.1 |
| 893 | RUBELLA VIRUS | VPVRLAGVGFESKIVDGGCF | 1776 | CAA28880.1 |
| 894 | RUBELLA VIRUS | VSCNVTTEHPFCNTPHGQLE | 1777 | CAA28880.1 |
| 895 | BORDETELLA | AAASSPDAHVPF | 1778 | AAA22983.1 |
| | PERTUSSIS | | | |
| 896 | BORDETELLA | AASSPDA | 1779 | AAA22983.1 |
| | PERTUSSIS | | | |
| 897 | BORDETELLA | AKLGAAASSPDA | 1780 | AAA22983.1 |
| | PERTUSSIS | | | |
| 898 | BORDETELLA | AMKPYEVTPTRM | 1781 | AAA22983.1 |
| | PERTUSSIS | | | |
| 899 | BORDETELLA | AMTHLSPALADVPYVLVKTNMVVTS | 1782 | AAA22983.1 |
| | PERTUSSIS | | | |
| 900 | BORDETELLA | ASSPDAHVPFCF | 1783 | AAA22983.1 |
| | PERTUSSIS | | | |
| 901 | BORDETELLA | ASSPDAHVPFCFGKDLKRPGSSPME | 1784 | AAA22983.1 |
| | PERTUSSIS | | | |
| 902 | BORDETELLA | CFGKDLKRPGSS | 1785 | AAA22983.1 |
| | PERTUSSIS | | | |
| 903 | BORDETELLA | CFGKDLKRPGSSPMEVMLRAVFMQQ | 1786 | AAA22983.1 |
| | PERTUSSIS | | | |
| 904 | BORDETELLA | CGIAAKLGAAAS | 1787 | AAA22983.1 |
| | PERTUSSIS | | | |
| 905 | BORDETELLA | CGIAAKLGAAASSPDAHVPFCFGKD | 1788 | AAA22983.1 |
| | PERTUSSIS | | | |
| 906 | BORDETELLA | DAHVPFCFGKDL | 1789 | AAA22983.1 |
| | PERTUSSIS | | | |
| 907 | BORDETELLA | DLKRPGSSPMEV | 1790 | AAA22983.1 |
| | PERTUSSIS | | | |
| 908 | BORDETELLA | DVPYVLVKTNMV | 1791 | AAA22983.1 |
| | PERTUSSIS | | | |
| 909 | BORDETELLA | DVPYVLVKTNMVVTSVAMKPYEVTPT | 1792 | AAA22983.1 |
| | PERTUSSIS | | | |
| 910 | BORDETELLA | EVMLRAVFMQQR | 1793 | AAA22983.1 |
| | PERTUSSIS | | | |
| 911 | BORDETELLA | FEGKPALELIRM | 1794 | AAA22983.1 |
| | PERTUSSIS | | | |
| 912 | BORDETELLA | FLGPKQLTFEGK | 1795 | AAA22983.1 |
| | PERTUSSIS | | | |
| 913 | BORDETELLA | FLGPKQLTFEGKPALELIRMVECSG | 1796 | AAA22983.1 |
| | PERTUSSIS | | | |
| 914 | BORDETELLA | FMQQRPLRMFLGPKQLT | 1797 | AAA22983.1 |
| | PERTUSSIS | | | |
| 915 | BORDETELLA | GKDLKRPGSSPM | 1798 | AAA22983.1 |
| | PERTUSSIS | | | |
| 916 | BORDETELLA | GKDLKRPGSSPME | 1799 | AAA22983.1 |
| | PERTUSSIS | | | |
| 917 | BORDETELLA | GKPALELIRMVE | 1800 | AAA22983.1 |
| | PERTUSSIS | | | |
| 918 | BORDETELLA | GPKQLTFEGKPA | 1801 | AAA22983.1 |
| | PERTUSSIS | | | |
| 919 | BORDETELLA | HVPFCFGKDLKR | 1802 | AAA22983.1 |
| | PERTUSSIS | | | |
| 920 | BORDETELLA | IAAKLGAAASSP | 1803 | AAA22983.1 |
| | PERTUSSIS | | | |
| 921 | BORDETELLA | KPYEVTPTRMLV | 1804 | AAA22983.1 |
| | PERTUSSIS | | | |
| 922 | BORDETELLA | KQLTFEGKPALE | 1805 | AAA22983.1 |
| | PERTUSSIS | | | |
| 923 | BORDETELLA | KRPGSSPMEVML | 1806 | AAA22983.1 |
| | PERTUSSIS | | | |
| 924 | BORDETELLA | LELIRMVECSGK | 1807 | AAA22983.1 |
| | PERTUSSIS | | | |
| 925 | BORDETELLA | LGAAASSPDAHV | 1808 | AAA22983.1 |
| | PERTUSSIS | | | |
| 926 | BORDETELLA | LIRMVECSGKQD | 1809 | AAA22983.1 |
| | PERTUSSIS | | | |
| 927 | BORDETELLA | LVCGIAAKLGAA | 1810 | AAA22983.1 |
| | PERTUSSIS | | | |
| 928 | BORDETELLA | MKPYEVTPTRM | 1811 | AAA22983.1 |
| | PERTUSSIS | | | |
| 929 | BORDETELLA | MLRAVFMQQRPL | 1812 | AAA22983.1 |
| | PERTUSSIS | | | |
| 930 | BORDETELLA | MQQRPLRM | 1813 | AAA22983.1 |
| | PERTUSSIS | | | |
| 931 | BORDETELLA | MQQRPLRMFLGP | 1814 | AAA22983.1 |
| | PERTUSSIS | | | |
| 932 | BORDETELLA | MVVTSVAMKPYE | 1815 | AAA22983.1 |
| | PERTUSSIS | | | |
| 933 | BORDETELLA | MVVTSVAMKPYEVTPTRMLVCGIAA | 1816 | AAA22983.1 |
| | PERTUSSIS | | | |
| 934 | BORDETELLA | PALELIRMVECS | 1817 | AAA22983.1 |
| | PERTUSSIS | | | |
| 935 | BORDETELLA | PALELIRMVECSGK | 1818 | AAA22983.1 |
| | PERTUSSIS | | | |
| 936 | BORDETELLA | PFCFGKDLKRPG | 1819 | AAA22983.1 |
| | PERTUSSIS | | | |
| 937 | BORDETELLA | PGSSPMEVMLRA | 1820 | AAA22983.1 |
| | PERTUSSIS | | | |
| 938 | BORDETELLA | PGSSPMEVMLRAVF | 1821 | AAA22983.1 |
| | PERTUSSIS | | | |
| 939 | BORDETELLA | PKQLTFEGK | 1822 | AAA22983.1 |
| | PERTUSSIS | | | |
| 940 | BORDETELLA | PLRMFLGPKQLT | 1823 | AAA22983.1 |
| | PERTUSSIS | | | |
| 941 | BORDETELLA | PTRMLVCGIAAK | 1824 | AAA22983.1 |
| | PERTUSSIS | | | |
| 942 | BORDETELLA | PYVLVKTNMVVT | 1825 | AAA22983.1 |
| | PERTUSSIS | | | |
| 943 | BORDETELLA | QLTFEGKPALELIRMVECSGKQDCP | 1826 | AAA22983.1 |
| | PERTUSSIS | | | |
| 944 | BORDETELLA | QRPLRMFLGPKQ | 1827 | AAA22983.1 |
| | PERTUSSIS | | | |
| 945 | BORDETELLA | RAVFMQQRPLRM | 1828 | AAA22983.1 |
| | PERTUSSIS | | | |
| 946 | BORDETELLA | RMFLGPKQLTFE | 1829 | AAA22983.1 |
| | PERTUSSIS | | | |
| 947 | BORDETELLA | RMLVCGIAAKLG | 1830 | AAA22983.1 |
| | PERTUSSIS | | | |
| 948 | BORDETELLA | RMVECSGKQDCP | 1831 | AAA22983.1 |
| | PERTUSSIS | | | |
| 949 | BORDETELLA | SPDAHVPFCFGK | 1832 | AAA22983.1 |
| | PERTUSSIS | | | |
| 950 | BORDETELLA | SSPMEVMLRAVF | 1833 | AAA22983.1 |
| | PERTUSSIS | | | |
| 951 | BORDETELLA | SSPMEVMLRAVFMQQRPLRMFLGPK | 1834 | AAA22983.1 |
| | PERTUSSIS | | | |
| 952 | BORDETELLA | SVAMKPYEVTPT | 1835 | AAA22983.1 |
| | PERTUSSIS | | | |
| 953 | BORDETELLA | VECSGKQDCP | 1836 | AAA22983.1 |
| | PERTUSSIS | | | |
| 954 | BORDETELLA | VFMQQRPLRMFL | 1837 | AAA22983.1 |
| | PERTUSSIS | | | |
| 955 | BORDETELLA | VFMQQRPLRMFLGPKQLTFEGKPAL | 1838 | AAA22983.1 |
| | PERTUSSIS | | | |
| 956 | BORDETELLA | VKTNMVVTSVAM | 1839 | AAA22983.1 |
| | PERTUSSIS | | | |
| 957 | BORDETELLA | VLVKTNMVVTSV | 1840 | AAA22983.1 |
| | PERTUSSIS | | | |
| 958 | BORDETELLA | VTPTRMLVCGIA | 1841 | AAA22983.1 |
| | PERTUSSIS | | | |
| 959 | BORDETELLA | VTSVAMKPYEVT | 1842 | AAA22983.1 |
| | PERTUSSIS | | | |
| 960 | BORDETELLA | YEVTPTRMLVCG | 1843 | AAA22983.1 |
| | PERTUSSIS | | | |
| 961 | BORDETELLA | YEVTPTRMLVCGIAAKLGAAASSPD | 1844 | AAA22983.1 |
| | PERTUSSIS | | | |
| 962 | BORDETELLA | CASPYEGRYRDMYDALR | 1845 | P04979.1 |
| | PERTUSSIS | | | |
| 963 | BORDETELLA | CAVFVRDGQSV | 1846 | P04979.1 |
| | PERTUSSIS | | | |
| 964 | BORDETELLA | CITTIYKTG | 1847 | P04979.1 |
| | PERTUSSIS | | | |
| 965 | BORDETELLA | CPNGTRALTV | 1848 | P04979.1 |
| | PERTUSSIS | | | |
| 966 | BORDETELLA | DALRRLLYMIYMSG | 1849 | P04979.1 |
| | PERTUSSIS | | | |
| 967 | RUBELLA VIRUS | GNRGRGQRRDWSRAPPPPEERQETRS | 1850 | P07566.1 |
| | STRAIN THERIEN | | | |
| 968 | BORDETELLA | GQPAADHYYSKVT | 1851 | P04979.1 |
| | PERTUSSIS | | | |
| 969 | RUBELLA VIRUS | GSPNCHGPDWASPVCQRHS | 1852 | ABD64214.1 |
| 970 | MEASLES VIRUS | HKSLSTNLDVTNSIEHQ | 1853 | P08362.1 |
| | STRAIN | | | |
| | EDMONSTON | | | |
| 971 | BORDETELLA | LFTQQGGAYGRC | 1854 | P04979.1 |
| | PERTUSSIS | | | |
| 972 | MEASLES VIRUS | LIGLLAIAGIRLHRAAIYTAEI | 1855 | P08362.1 |
| | STRAIN | | | |
| | EDMONSTON | | | |
| 973 | MEASLES | PDTAADSELRRWIKY | 1856 | ABI54110.1 |
| | MORBILLIVIRUS | | | |
| 974 | RUBELLA VIRUS | PNCHGPDWASPVCQRHS | 1857 | P07566.1 |
| | STRAIN THERIEN | | | |
| 975 | RUBELLA VIRUS | QTPAPKPSRAPPQQPQPPRMQTGR | 1858 | ABD64216.1 |
| 976 | RUBELLA VIRUS | RAGLTAGASQSRRPRPPR | 1859 | CAA33016.1 |
| | VACCINE STRAIN | | | |
| | RA27/3 | | | |
| 977 | RUBELLA VIRUS | RFGAPQAFLAGLLLAAVAVGTARA | 1860 | ABD64214.1 |
| | VACCINE STRAIN | | | |
| | RA27/3 | | | |
| 978 | BORDETELLA | RGNAELQTYLRQITPG | 1861 | P04979.1 |
| | PERTUSSIS | | | |
| 979 | BORDETELLA | RVHVSKEEQYYDYED | 1862 | P04979.1 |
| | PERTUSSIS | | | |
| 980 | BORDETELLA | SIYGLYDGTYL | 1863 | P04979.1 |
| | PERTUSSIS | | | |
| 981 | BORDETELLA | SKVTATRLLASTNS | 1864 | P04979.1 |
| | PERTUSSIS | | | |
| 982 | BORDETELLA | TQQGGAYGRCPNGTRA | 1865 | P04979.1 |
| | PERTUSSIS | | | |
| 983 | BORDETELLA | VAPGIVIPPKAL | 1866 | P04979.1 |
| | PERTUSSIS | | | |
| 984 | BORDETELLA | DSRPPEDVFQNGFTAWG | 1867 | ACI04548.1 |
| | PERTUSSIS | | | |
| 985 | BORDETELLA | EHRMQEAVEAERAGR | 1868 | ACI04548.1 |
| | PERTUSSIS | | | |
| 986 | MEASLES VIRUS | ETCFQQACKGKIQALCENPEWA | 1869 | P08362.1 |
| | STRAIN | | | |
| | EDMONSTON | | | |
| 987 | BORDETELLA | EYVDTYGDNAGRILAGALATYQ | 1870 | ACI04548.1 |
| | PERTUSSIS | | | |
| 988 | BORDETELLA | HRRIPPENIRRVTR | 1871 | ACI04548.1 |
| | PERTUSSIS | | | |
| 989 | BORDETELLA | MARQAESSE | 1872 | ACI04548.1 |
| | PERTUSSIS | | | |
| 990 | BORDETELLA | MQEAVEAERAGR | 1873 | ACI04548.1 |
| | PERTUSSIS | | | |
| 991 | BORDETELLA | SQQTRANPNPYTSRR | 1874 | ACI04548.1 |
| | PERTUSSIS | | | |
| 992 | BORDETELLA | TRANPNPYTSRRSVASIVGTLVHG | 1875 | SRC280066 |
| | PERTUSSIS | | | |
| 993 | BORDETELLA | TVYRYDSRPPED | 1876 | ACI04548.1 |
| | PERTUSSIS | | | |
| 994 | MEASLES | NDRNLLD | 1877 | P10050.1 |
| | MORBILLIVIRUS | | | |
| 995 | MEASLES | NMEDEADQYFSHDDPISSDQSRFGW | 1878 | P04851.1 |
| | MORBILLIVIRUS | FENK | | |
| 996 | MEASLES | SRASDARAAHLPTGTPLDID | 1879 | P04851.1 |
| | MORBILLIVIRUS | | | |
| 997 | BORDETELLA | EDVFQNGFTAW | 1880 | ACI04548.1 |
| | PERTUSSIS | | | |
| 998 | CORYNEBACTERIUM | AEGSSSVEYINNWEQAK | 1881 | AAV70486.1 |
| | DIPHTHERIAE | | | |
| 999 | CORYNEBACTERIUM | GPIKNKMSESPNKT | 1882 | AAV70486.1 |
| | DIPHTHERIAE | | | |
| 1000 | MEASLES VIRUS | GPKLTGALIGILSLFVESPGQLIQRITD | 1883 | P10050.1 |
| | STRAIN HALLE | DPDV | | |
| 1001 | CORYNEBACTERIUM | GYQKTVDHTKVNSK | 1884 | AAV70486.1 |
| | DIPHTHERIAE | | | |
| 1002 | CORYNEBACTERIUM | KTVDH | 1885 | AAV70486.1 |
| | DIPHTHERIAE | | | |
| 1003 | CORYNEBACTERIUM | SESPNK | 1886 | AAV70486.1 |
| | DIPHTHERIAE | | | |
| 1004 | CORYNEBACTERIUM | AEGSSSVEYINNWEQAKALS | 1887 | AAV70486.1 |
| | DIPHTHERIAE | | | |
| 1005 | CORYNEBACTERIUM | AQAIPLVGELVDIGFAAYNF | 1888 | AAV70486.1 |
| | DIPHTHERIAE | | | |
| 1006 | CORYNEBACTERIUM | ASRVVLSLPFAEGSSSVEYI | 1889 | AAV70486.1 |
| | DIPHTHERIAE | | | |
| 1007 | CORYNEBACTERIUM | CINLDWDVIRDKTKTKIESL | 1890 | AAV70486.1 |
| | DIPHTHERIAE | | | |
| 1008 | CORYNEBACTERIUM | CRAIDGDVTFCRPKSPVYVG | 1891 | AAV70486.1 |
| | DIPHTHERIAE | | | |
| 1009 | CORYNEBACTERIUM | CRPKSPVYVGNGVHANLHVA | 1892 | AAV70486.1 |
| | DIPHTHERIAE | | | |
| 1010 | CORYNEBACTERIUM | DAAGYSVDNENPLSGKAGGV | 1893 | AAV70486.1 |
| | DIPHTHERIAE | | | |
| 1011 | CORYNEBACTERIUM | DKTKTKIESLKEHGPIKNKM | 1894 | AAV70486.1 |
| | DIPHTHERIAE | | | |
| 1012 | CORYNEBACTERIUM | EEFIKRFGDGASRVVLSLPF | 1895 | AAV70486.1 |
| | DIPHTHERIAE | | | |
| 1013 | CORYNEBACTERIUM | EKAKQYLEEFHQTALEHPEL | 1896 | AAV70486.1 |
| | DIPHTHERIAE | | | |
| 1014 | CORYNEBACTERIUM | FHRSSSEKIHSNEISSDSIG | 1897 | AAV70486.1 |
| | DIPHTHERIAE | | | |
| 1015 | CORYNEBACTERIUM | GADDVVDSSKSFVMENFSSY | 1898 | CAE11230.1 |
| | DIPHTHERIAE | | | |
| 1016 | CORYNEBACTERIUM | GKRGQDAMYEYMAQACAGNR | 1899 | AAV70486.1 |
| | DIPHTHERIAE | | | |
| 1017 | CORYNEBACTERIUM | GSVMGIADGAVHHNTEEIVA | 1900 | AAV70486.1 |
| | DIPHTHERIAE | | | |
| 1018 | CORYNEBACTERIUM | GTQGNYDDDWKGFYSTDNKY | 1901 | AAV70486.1 |
| | DIPHTHERIAE | | | |
| 1019 | CORYNEBACTERIUM | HDGYAVSWNTVEDSIIRTGF | 1902 | AAV70486.1 |
| | DIPHTHERIAE | | | |
| 1020 | CORYNEBACTERIUM | HGTKPGYVDSIQKGIQKPKS | 1903 | AAV70486.1 |
| | DIPHTHERIAE | | | |
| 1021 | CORYNEBACTERIUM | HQTALEHPELSELKTVTGTN | 1904 | AAV70486.1 |
| | DIPHTHERIAE | | | |
| 1022 | CORYNEBACTERIUM | IQKGIQKPKSGTQGNYDDDW | 1905 | AAV70486.1 |
| | DIPHTHERIAE | | | |
| 1023 | CORYNEBACTERIUM | KEHGPIKNKMSESPNKTVSE | 1906 | AAV70486.1 |
| | DIPHTHERIAE | | | |
| 1024 | CORYNEBACTERIUM | KGFYSTDNKYDAAGYSVDNE | 1907 | AAV70486.1 |
| | DIPHTHERIAE | | | |
| 1025 | CORYNEBACTERIUM | LDVNKSKTHISVNGRKIRMR | 1908 | AAV70486.1 |
| | DIPHTHERIAE | | | |
| 1026 | RUBELLA VIRUS | MASTIPITMEDLQKALEA | 1909 | SRC265968 |
| 1027 | CORYNEBACTERIUM | NGVHANLHVAFHRSSSEKIH | 1910 | AAV70486.1 |
| | DIPHTHERIAE | | | |
| 1028 | CORYNEBACTERIUM | NNWEQAKALSVELEINFETR | 1911 | AAV70486.1 |
| | DIPHTHERIAE | | | |
| 1029 | CORYNEBACTERIUM | NPLSGKAGGVVKVTYPGLTK | 1912 | AAV70486.1 |
| | DIPHTHERIAE | | | |
| 1030 | CORYNEBACTERIUM | PVFAGANYAAWAVNVAQVID | 1913 | AAV70486.1 |
| | DIPHTHERIAE | | | |
| 1031 | CORYNEBACTERIUM | SELKTVTGTNPVFAGANYAA | 1914 | AAV70486.1 |
| | DIPHTHERIAE | | | |
| 1032 | CORYNEBACTERIUM | SESPNKTVSEEKAKQYLEEF | 1915 | AAV70486.1 |
| | DIPHTHERIAE | | | |
| 1033 | CORYNEBACTERIUM | SETADNLEKTTAALSILPGI | 1916 | AAV70486.1 |
| | DIPHTHERIAE | | | |
| 1034 | CORYNEBACTERIUM | SFVMENFSSYHGTKPGYVDS | 1917 | AAV70486.1 |
| | DIPHTHERIAE | | | |
| 1035 | CORYNEBACTERIUM | SNEISSDSIGVLGYQKTVDH | 1918 | AAV70486.1 |
| | DIPHTHERIAE | | | |
| 1036 | CORYNEBACTERIUM | SPGHKTQPFLHDGYAVSWNT | 1919 | AAV70486.1 |
| | DIPHTHERIAE | | | |
| 1037 | CORYNEBACTERIUM | SVNGRKIRMRCRAIDGDVTF | 1920 | AAV70486.1 |
| | DIPHTHERIAE | | | |
| 1038 | CORYNEBACTERIUM | TAALSILPGIGSVMGIADGA | 1921 | AAV70486.1 |
| | DIPHTHERIAE | | | |
| 1039 | CORYNEBACTERIUM | TAENTPLPIAGVLLPTIPGK | 1922 | AAV70486.1 |
| | DIPHTHERIAE | | | |
| 1040 | CORYNEBACTERIUM | TEPLMEQVGTEEFIKRFGDG | 1923 | AAV70486.1 |
| | DIPHTHERIAE | | | |
| 1041 | CORYNEBACTERIUM | TIKKELGLSLTEPLMEQVGT | 1924 | AAV70486.1 |
| | DIPHTHERIAE | | | |
| 1042 | CORYNEBACTERIUM | TKVNSKLSLFFEIKS | 1925 | AAV70486.1 |
| | DIPHTHERIAE | | | |
| 1043 | CORYNEBACTERIUM | VEDSIIRTGFQGESGHDIKI | 1926 | AAV70486.1 |
| | DIPHTHERIAE | | | |
| 1044 | CORYNEBACTERIUM | VELEINFETRGKRGQDAMYE | 1927 | AAV70486.1 |
| | DIPHTHERIAE | | | |
| 1045 | CORYNEBACTERIUM | VESIINLFQVVHNSYNRPAY | 1928 | AAV70486.1 |
| | DIPHTHERIAE | | | |
| 1046 | CORYNEBACTERIUM | VHNSYNRPAYSPGHKTQPFL | 1929 | AAV70486.1 |
| | DIPHTHERIAE | | | |
| 1047 | CORYNEBACTERIUM | VKVTYPGLTKVLALKVDNAE | 1930 | AAV70486.1 |
| | DIPHTHERIAE | | | |
| 1048 | CORYNEBACTERIUM | VLALKVDNAETIKKELGLSL | 1931 | AAV70486.1 |
| | DIPHTHERIAE | | | |
| 1049 | CORYNEBACTERIUM | VLGYQKTVDHTKVNSKLSLF | 1932 | AAV70486.1 |
| | DIPHTHERIAE | | | |
| 1050 | CORYNEBACTERIUM | VRRSVGSSLSCINLDWDVIR | 1933 | AAV70486.1 |
| | DIPHTHERIAE | | | |
| 1051 | CORYNEBACTERIUM | WAVNVAQVIDSETADNLEKT | 1934 | AAV70486.1 |
| | DIPHTHERIAE | | | |
| 1052 | CORYNEBACTERIUM | YMAQACAGNRVRRSVGSSLS | 1935 | AAV70486.1 |
| | DIPHTHERIAE | | | |
| 1053 | BORDETELLA | AKAPPAPKPAPQPGP | 1936 | ABO77783.1 |
| | PERTUSSIS | | | |
| 1054 | BORDETELLA | APKPAPQPGP | 1937 | ABO77783.1 |
| | PERTUSSIS | | | |
| 1055 | BORDETELLA | APKPAPQPGPQPPQP | 1938 | ABO77783.1 |
| | PERTUSSIS | | | |
| 1056 | MEASLES VIRUS | AQTRTPLQCTMTEIF | 1939 | P04851.1 |
| | STRAIN | | | |
| | EDMONSTON | | | |
| 1057 | MEASLES VIRUS | ASRGTNMEDEADQYFSHDD | 1940 | P04851.1 |
| | STRAIN | | | |
| | EDMONSTON | | | |
| 1058 | BORDETELLA | ATIRR | 1941 | ABO77783.1 |
| | PERTUSSIS | | | |
| 1059 | BORDETELLA | DNRAG | 1942 | ABO77783.1 |
| | PERTUSSIS | | | |
| 1060 | BORDETELLA | EAPAPQPPAGRELSA | 1943 | ABO77783.1 |
| | PERTUSSIS | | | |
| 1061 | MEASLES VIRUS | EMVRRSAGKVSSTLASELGI | 1944 | P04851.1 |
| | STRAIN | | | |
| | EDMONSTON | | | |
| 1062 | BORDETELLA | GASEL | 1945 | ABO77783.1 |
| | PERTUSSIS | | | |
| 1063 | BORDETELLA | GDALAGGAVP | 1946 | AAA22980.1 |
| | PERTUSSIS | | | |
| 1064 | BORDETELLA | GDAPAGGAVP | 1947 | ABO77783.1 |
| | PERTUSSIS | | | |
| 1065 | BORDETELLA | GDTWDDD | 1948 | ABO77783.1 |
| | PERTUSSIS | | | |
| 1066 | BORDETELLA | GERQH | 1949 | ABO77783.1 |
| | PERTUSSIS | | | |
| 1067 | BORDETELLA | GGAVP | 1950 | ABO77783.1 |
| | PERTUSSIS | | | |
| 1068 | BORDETELLA | GGFGP | 1951 | P14283.3 |
| | PERTUSSIS | | | |
| 1069 | BORDETELLA | GGFGPGGFGP | 1952 | BAF35031.1 |
| | PERTUSSIS | | | |
| 1070 | BORDETELLA | GGFGPVLDGW | 1953 | ABO77783.1 |
| | PERTUSSIS | | | |
| 1071 | MEASLES VIRUS | GGKEDRRVKQSRGEARESYR | 1954 | P04851.1 |
| | STRAIN | | | |
| | EDMONSTON | | | |
| 1072 | BORDETELLA | GILLEN | 1955 | ABO77783.1 |
| | PERTUSSIS | | | |
| 1073 | BORDETELLA | GIRRFL | 1956 | ABO77783.1 |
| | PERTUSSIS | | | |
| 1074 | MEASLES VIRUS | HDDPISSDQSRFGWFENKEI | 1957 | P04851.1 |
| | STRAIN | | | |
| | EDMONSTON | | | |
| 1075 | MEASLES VIRUS | HEFAGELSTLESLMNLY | 1958 | P04851.1 |
| | STRAIN | | | |
| | EDMONSTON | | | |
| 1076 | BORDETELLA | HLGGLAGY | 1959 | ABO77783.1 |
| | PERTUSSIS | | | |
| 1077 | MEASLES VIRUS | HTTEDKISRAVGPRQAQVSFL | 1960 | P04851.1 |
| | STRAIN | | | |
| | EDMONSTON | | | |
| 1078 | MEASLES VIRUS | ICDIDTYIVEAGLASFILTI | 1961 | P04851.1 |
| | STRAIN | | | |
| | EDMONSTON | | | |
| 1079 | MEASLES VIRUS | IIIVPIPGDSSITTRSRLLD | 1962 | P04851.1 |
| | STRAIN | | | |
| | EDMONSTON | | | |
| 1080 | MEASLES VIRUS | ILDIKRTPGNKPRIAEMICD | 1963 | P04851.1 |
| | STRAIN | | | |
| | EDMONSTON | | | |
| 1081 | BORDETELLA | KALLYR | 1964 | ABO77783.1 |
| | PERTUSSIS | | | |
| 1082 | MEASLES VIRUS | KPPITSGSGGAIRGIKHIII | 1965 | P04851.1 |
| | STRAIN | | | |
| | EDMONSTON | | | |
| 1083 | BORDETELLA | LAGSGL | 1966 | ABO77783.1 |
| | PERTUSSIS | | | |
| 1084 | MEASLES VIRUS | LGITAEDARLVSEIAMHTTE | 1967 | P04851.1 |
| | STRAIN | | | |
| | EDMONSTON | | | |
| 1085 | MEASLES VIRUS | LGTILAQIWVLLAKAVTA | 1968 | P04851.1 |
| | STRAIN | | | |
| | EDMONSTON | | | |
| 1086 | MEASLES VIRUS | LPTGTPLDIDTASESSQD | 1969 | P04851.1 |
| | STRAIN | | | |
| | EDMONSTON | | | |
| 1087 | MEASLES VIRUS | MATLLRSLALFKRNKDK | 1970 | P04851.1 |
| | STRAIN | | | |
| | EDMONSTON | | | |
| 1088 | BORDETELLA | PAPQPP | 1971 | ABO77783.1 |
| | PERTUSSIS | | | |
| 1089 | MEASLES VIRUS | PDTAADSELRRWIKYTQQRR | 1972 | P04851.1 |
| | STRAIN | | | |
| | EDMONSTON | | | |
| 1090 | MEASLES VIRUS | PKLTGALIGILSLFVESPGQ | 1973 | P04851.1 |
| | STRAIN | | | |
| | EDMONSTON | | | |
| 1091 | BORDETELLA | PQP | 1974 | ABO77783.1 |
| | PERTUSSIS | | | |
| 1092 | BORDETELLA | PQPGP | 1975 | ABO77783.1 |
| | PERTUSSIS | | | |
| 1093 | BORDETELLA | PQPGPQPPQPPQPQP | 1976 | ABO77783.1 |
| | PERTUSSIS | | | |
| 1094 | MEASLES VIRUS | QDPQDSRRSAEPLLSCKPWQ | 1977 | P04851.1 |
| | STRAIN | | | |
| | EDMONSTON | | | |
| 1095 | MEASLES VIRUS | QRRVVGEFRLERKWLDVVR | 1978 | P04851.1 |
| | STRAIN | | | |
| | EDMONSTON | | | |
| 1096 | BORDETELLA | RELSA | 1979 | ABO77783.1 |
| | PERTUSSIS | | | |
| 1097 | BORDETELLA | RFAPQ | 1980 | ABO77783.1 |
| | PERTUSSIS | | | |
| 1098 | MEASLES VIRUS | SIQNKFSAGSYPLLWSYAMG | 1981 | P04851.1 |
| | STRAIN | | | |
| | EDMONSTON | | | |
| 1099 | BORDETELLA | SITLQAGAH | 1982 | ABO77783.1 |
| | PERTUSSIS | | | |
| 1100 | BORDETELLA | SLQPED | 1983 | ABO77783.1 |
| | PERTUSSIS | | | |
| 1101 | BORDETELLA | SNALSKRL | 1984 | ABO77783.1 |
| | PERTUSSIS | | | |
| 1102 | MEASLES VIRUS | SPGQLIQRITDDPDVSIRLL | 1985 | P04851.1 |
| | STRAIN | | | |
| | EDMONSTON | | | |
| 1103 | BORDETELLA | TELPSIPG | 1986 | ABO77783.1 |
| | PERTUSSIS | | | |
| 1104 | BORDETELLA | TFTLANK | 1987 | ABO77783.1 |
| | PERTUSSIS | | | |
| 1105 | BORDETELLA | TWDDD | 1988 | ABO77783.1 |
| | PERTUSSIS | | | |
| 1106 | MEASLES VIRUS | VSFLQGDQSENELPRLGGKE | 1989 | P04851.1 |
| | STRAIN | | | |
| | EDMONSTON | | | |
| 1107 | MEASLES VIRUS | WQESRKNKAQTRTPLQC | 1990 | P04851.1 |
| | STRAIN | | | |
| | EDMONSTON | | | |
| 1108 | MEASLES VIRUS | YAMGVGVELENSMGGLNFGR | 1991 | P04851.1 |
| | STRAIN | | | |
| | EDMONSTON | | | |
| 1109 | MEASLES VIRUS | YQQMGKPAPYMVNLENSI | 1992 | P04851.1 |
| | STRAIN | | | |
| | EDMONSTON | | | |
| 1110 | MEASLES VIRUS | MTRSSHQSLVIKLMP | 1993 | P69355.1 |
| | STRAIN HALLE | | | |
| 1111 | MEASLES VIRUS | PIRDALNAMTQNIRP | 1994 | P69355.1 |
| | STRAIN HALLE | | | |
| 1112 | RUBELLA VIRUS | ALLNTPPPYQVSCGGESDRASAGH | 1995 | CAA28880.1 |
| | STRAIN M33 | | | |
| 1113 | RUBELLA VIRUS | GLGSPNCHGPDWASPVCQRHS | 1996 | P07566.1 |
| | STRAIN THERIEN | | | |
| 1114 | RUBELLA VIRUS | GLGSPNCHGPDWASPVCQRHSPDCS | 1997 | P07566.1 |
| | STRAIN THERIEN | RLV | | |
| 1115 | RUBELLA VIRUS | NYTGNQQSRWGLGSPNCHGPDWASPV | 1998 | P07566.1 |
| | STRAIN THERIEN | | | |
| 1116 | RUBELLA VIRUS | TLPQPPCAHGQHYGHHHHQL | 1999 | P07566.1 |
| | STRAIN THERIEN | | | |
| 1117 | RUBELLA VIRUS | TVRVKFHTETRTVWQLSVAGVSCNVT | 2000 | P07566.1 |
| | STRAIN THERIEN | | | |
| 1118 | RUBELLA VIRUS | ASYFNPGGSYYKQYH | 2001 | BAA28178.1 |
| 1119 | RUBELLA VIRUS | FALASYVQHPHKTVR | 2002 | BAA28178.1 |
| 1120 | RUBELLA VIRUS | GGESDRASARVIDPAAQSFTG | 2003 | BAA28178.1 |
| 1121 | RUBELLA VIRUS | GPGEVWVTPVIGSQARKC | 2004 | BAA28178.1 |
| 1122 | RUBELLA VIRUS | GSQARKCGLHIRAG | 2005 | BAA28178.1 |
| 1123 | RUBELLA VIRUS | LVGATPERPRLRLVDADDPLLRTAP | 2006 | BAA28178.1 |
| 1124 | RUBELLA VIRUS | TAPGPGEVWVTPVI | 2007 | BAA28178.1 |
| 1125 | MEASLES | FIVLSIAYPTLSEIK | 2008 | AAL29688.1 |
| | MORBILLIVIRUS | | | |
| 1126 | MEASLES VIRUS | ETCFQQACKGKIQALCENPEWAPLK | 2009 | P08362.1 |
| | STRAIN | DNRIPSY | | |
| | EDMONSTON- | | | |
| | ZAGREB | | | |
| 1127 | MEASLES | LPRLGGKEDR | 2010 | P04851.1 |
| | MORBILLIVIRUS | | | |
| 1128 | MEASLES | MSKTEWNASQ | 2011 | SRC280080 |
| | MORBILLIVIRUS | | | |
| 1129 | MEASLES | SRFGWFENKE | 2012 | P04851.1 |
| | MORBILLIVIRUS | | | |
| 1130 | RUBELLA VIRUS | EACVTSWLWSEGEGAVFYRVDLHFI | 2013 | CAA28880.1 |
| | | NLGT | | |
| 1131 | RUBELLA VIRUS | MDFWCVEHDRPPPATPTSLTT | 2014 | CAA33016.1 |
| 1132 | RUBELLA VIRUS | PFLGHDGHHGGTLRVGQHHRNASDV | 2015 | CAA33016.1 |
| 1133 | RUBELLA VIRUS | RVKFHTETRTVWQLSVAGVSC | 2016 | BAA19893.1 |
| 1134 | MEASLES | AEEQARHVKNGLE | 2017 | ABO69699.1 |
| | MORBILLIVIRUS | | | |
| 1135 | MEASLES | ESPQEISKHQALG | 2018 | SRC280080 |
| | MORBILLIVIRUS | | | |
| 1136 | MEASLES | GVGVELENSMGGLNF | 2019 | ABI54110.1 |
| | MORBILLIVIRUS | | | |
| 1137 | MEASLES | IKGANDLAKFHQMLMKIIMK | 2020 | ABO69699.1 |
| | MORBILLIVIRUS | | | |
| 1138 | MEASLES | MSKTLHAQLGFKKT | 2021 | ABK40528.1 |
| | MORBILLIVIRUS | | | |
| 1139 | MEASLES | NASGLSRPSPSAH | 2022 | BAE98296.1 |
| | MORBILLIVIRUS | | | |
| 1140 | MEASLES | VRVIDPSLGDRKDE | 2023 | SRC280148 |
| | MORBILLIVIRUS | | | |
| 1141 | BORDETELLA | DLSDGDLLV | 2024 | AAC31207.1 |
| | PERTUSSIS | | | |
| 1142 | BORDETELLA | EAERAGRGTG | 2025 | ACI04548.1 |
| | PERTUSSIS | | | |
| 1143 | BORDETELLA | YRYDSRPPEDV | 2026 | ACI04548.1 |
| | PERTUSSIS | | | |
| 1144 | BORDETELLA | YVDTYGDNAG | 2027 | ACI04548.1 |
| | PERTUSSIS | | | |
| 1145 | MEASLES | SFSYFYPFR | 2028 | CAB43772.1 |
| | MORBILLIVIRUS | | | |
| 1146 | MUMPS | DIFIVSPR | 2029 | ADF49557.1 |
| | RUBULAVIRUS | | | |
| 1147 | MEASLES | QDSRRSADALLRLQAMAGISEEQGS | 2030 | CAA59302.1 |
| | MORBILLIVIRUS | DTDTPIVYNDRN | | |
| 1148 | MEASLES | SAEALLRLQA | 2031 | BAH22350.1 |
| | MORBILLIVIRUS | | | |
| 1149 | MEASLES | RIVINREHL | 2032 | BAB39835.1 |
| | MORBILLIVIRUS | | | |
| 1150 | MEASLES VIRUS | IPRFK | 2033 | BAB39848.1 |
| | GENOTYPE A | | | |
| 1151 | BORDETELLA | AAALSPMEI | 2034 | P15318.2 |
| | PERTUSSIS | | | |
| 1152 | BORDETELLA | AAASVVGAPV | 2035 | P15318.2 |
| | PERTUSSIS | | | |
| 1153 | BORDETELLA | AALGRQDSI | 2036 | P15318.2 |
| | PERTUSSIS | | | |
| 1154 | BORDETELLA | AAQRLVHAIA | 2037 | P15318.2 |
| | PERTUSSIS | | | |
| 1155 | BORDETELLA | AAVEAAEL | 2038 | P15318.2 |
| | PERTUSSIS | | | |
| 1156 | BORDETELLA | AGANVLNGL | 2039 | P15318.2 |
| | PERTUSSIS | | | |
| 1157 | BORDETELLA | AGYANAAD | 2040 | P15318.2 |
| | PERTUSSIS | | | |
| 1158 | BORDETELLA | AGYEQFEFRV | 2041 | P15318.2 |
| | PERTUSSIS | | | |
| 1159 | BORDETELLA | AITGNADNL | 2042 | P15318.2 |
| | PERTUSSIS | | | |
| 1160 | BORDETELLA | AKEKNATLM | 2043 | P15318.2 |
| | PERTUSSIS | | | |
| 1161 | BORDETELLA | AKGVFLSL | 2044 | P15318.2 |
| | PERTUSSIS | | | |
| 1162 | BORDETELLA | APHEYGFGI | 2045 | P15318.2 |
| | PERTUSSIS | | | |
| 1163 | BORDETELLA | ARQGNDLEI | 2046 | P15318.2 |
| | PERTUSSIS | | | |
| 1164 | BORDETELLA | ASVVGAPV | 2047 | P15318.2 |
| | PERTUSSIS | | | |
| 1165 | BORDETELLA | ATLMFRLV | 2048 | P15318.2 |
| | PERTUSSIS | | | |
| 1166 | BORDETELLA | AVAAAQRL | 2049 | P15318.2 |
| | PERTUSSIS | | | |
| 1167 | BORDETELLA | DAGANVLNGL | 2050 | P15318.2 |
| | PERTUSSIS | | | |
| 1168 | BORDETELLA | DALLAQLYR | 2051 | P15318.2 |
| | PERTUSSIS | | | |
| 1169 | BORDETELLA | DANGVLKHSI | 2052 | P15318.2 |
| | PERTUSSIS | | | |
| 1170 | BORDETELLA | DGDMNIGVI | 2053 | P15318.2 |
| | PERTUSSIS | | | |
| 1171 | BORDETELLA | DHVKNIENL | 2054 | P15318.2 |
| | PERTUSSIS | | | |
| 1172 | BORDETELLA | DIDMFAIM | 2055 | P15318.2 |
| | PERTUSSIS | | | |
| 1173 | BORDETELLA | DMFAIMPHL | 2056 | P15318.2 |
| | PERTUSSIS | | | |
| 1174 | BORDETELLA | DNVRNVENV | 2057 | P15318.2 |
| | PERTUSSIS | | | |
| 1175 | BORDETELLA | DNVRNVENVI | 2058 | P15318.2 |
| | PERTUSSIS | | | |
| 1176 | BORDETELLA | DTVDYSAM | 2059 | P15318.2 |
| | PERTUSSIS | | | |
| 1177 | BORDETELLA | DTVDYSAMI | 2060 | P15318.2 |
| | PERTUSSIS | | | |
| 1178 | BORDETELLA | DYLRQAGL | 2061 | P15318.2 |
| | PERTUSSIS | | | |
| 1179 | BORDETELLA | DYYDNVRNV | 2062 | P15318.2 |
| | PERTUSSIS | | | |
| 1180 | BORDETELLA | EFTTFVEI | 2063 | P15318.2 |
| | PERTUSSIS | | | |
| 1181 | BORDETELLA | EFTTFVEIV | 2064 | P15318.2 |
| | PERTUSSIS | | | |
| 1182 | BORDETELLA | EGYVFYEN | 2065 | P15318.2 |
| | PERTUSSIS | | | |
| 1183 | BORDETELLA | ENVQYRHV | 2066 | P15318.2 |
| | PERTUSSIS | | | |
| 1184 | BORDETELLA | EQLANSDGL | 2067 | P15318.2 |
| | PERTUSSIS | | | |
| 1185 | BORDETELLA | FGVGYGHDTI | 2068 | P15318.2 |
| | PERTUSSIS | | | |
| 1186 | BORDETELLA | FSPDVLETVP | 2069 | P15318.2 |
| | PERTUSSIS | | | |
| 1187 | BORDETELLA | FSVDHVKNI | 2070 | P15318.2 |
| | PERTUSSIS | | | |
| 1188 | BORDETELLA | GDDTYLFGV | 2071 | P15318.2 |
| | PERTUSSIS | | | |
| 1189 | BORDETELLA | GDDVFLQDL | 2072 | P15318.2 |
| | PERTUSSIS | | | |
| 1190 | BORDETELLA | GEDGNDIFL | 2073 | P15318.2 |
| | PERTUSSIS | | | |
| 1191 | BORDETELLA | GERFNVRKQL | 2074 | P15318.2 |
| | PERTUSSIS | | | |
| 1192 | BORDETELLA | GGAGNDTLV | 2075 | P15318.2 |
| | PERTUSSIS | | | |
| 1193 | BORDETELLA | GGDDFEAV | 2076 | P15318.2 |
| | PERTUSSIS | | | |
| 1194 | BORDETELLA | GKSEFTTFV | 2077 | P15318.2 |
| | PERTUSSIS | | | |
| 1195 | BORDETELLA | GKSLFDDGL | 2078 | P15318.2 |
| | PERTUSSIS | | | |
| 1196 | BORDETELLA | GNADNLKSV | 2079 | P15318.2 |
| | PERTUSSIS | | | |
| 1197 | BORDETELLA | GQLVEVDTL | 2080 | P15318.2 |
| | PERTUSSIS | | | |
| 1198 | BORDETELLA | GRSKFSPDV | 2081 | P15318.2 |
| | PERTUSSIS | | | |
| 1199 | BORDETELLA | GSSAYDTV | 2082 | P15318.2 |
| | PERTUSSIS | | | |
| 1200 | BORDETELLA | GTVEKWPAL | 2083 | P15318.2 |
| | PERTUSSIS | | | |
| 1201 | BORDETELLA | GVDYYDNV | 2084 | P15318.2 |
| | PERTUSSIS | | | |
| 1202 | BORDETELLA | GYEQFEFRV | 2085 | P15318.2 |
| | PERTUSSIS | | | |
| 1203 | BORDETELLA | HAVGAQDVV | 2086 | P15318.2 |
| | PERTUSSIS | | | |
| 1204 | BORDETELLA | IAAGRIGLGI | 2087 | P15318.2 |
| | PERTUSSIS | | | |
| 1205 | BORDETELLA | IGDAQANTL | 2088 | P15318.2 |
| | PERTUSSIS | | | |
| 1206 | BORDETELLA | IGLGILADL | 2089 | P15318.2 |
| | PERTUSSIS | | | |
| 1207 | BORDETELLA | IGNAAGIPL | 2090 | P15318.2 |
| | PERTUSSIS | | | |
| 1208 | BORDETELLA | IGTSMKDVL | 2091 | P15318.2 |
| | PERTUSSIS | | | |
| 1209 | BORDETELLA | IGVITDFEL | 2092 | P15318.2 |
| | PERTUSSIS | | | |
| 1210 | BORDETELLA | IPLTADIDM | 2093 | P15318.2 |
| | PERTUSSIS | | | |
| 1211 | BORDETELLA | ISKSALEL | 2094 | P15318.2 |
| | PERTUSSIS | | | |
| 1212 | BORDETELLA | ITGNADNL | 2095 | P15318.2 |
| | PERTUSSIS | | | |
| 1213 | BORDETELLA | KIFVVSAT | 2096 | P15318.2 |
| | PERTUSSIS | | | |
| 1214 | BORDETELLA | KQLNNANVYR | 2097 | P15318.2 |
| | PERTUSSIS | | | |
| 1215 | BORDETELLA | KVIGNAAGI | 2098 | P15318.2 |
| | PERTUSSIS | | | |
| 1216 | BORDETELLA | LAKVVSQL | 2099 | P15318.2 |
| | PERTUSSIS | | | |
| 1217 | BORDETELLA | LANDYARKI | 2100 | P15318.2 |
| | PERTUSSIS | | | |
| 1218 | BORDETELLA | LDYLRQAGL | 2101 | P15318.2 |
| | PERTUSSIS | | | |
| 1219 | BORDETELLA | LGKGFASL | 2102 | P15318.2 |
| | PERTUSSIS | | | |
| 1220 | BORDETELLA | LGKGFASLM | 2103 | P15318.2 |
| | PERTUSSIS | | | |
| 1221 | BORDETELLA | LGVDYYDN | 2104 | P15318.2 |
| | PERTUSSIS | | | |
| 1222 | BORDETELLA | LGVDYYDNV | 2105 | P15318.2 |
| | PERTUSSIS | | | |
| 1223 | BORDETELLA | LKHSIKLDVI | 2106 | P15318.2 |
| | PERTUSSIS | | | |
| 1224 | BORDETELLA | LQAGYIPV | 2107 | P15318.2 |
| | PERTUSSIS | | | |
| 1225 | BORDETELLA | LQLTGGTVE | 2108 | P15318.2 |
| | PERTUSSIS | | | |
| 1226 | BORDETELLA | LSAAVFGL | 2109 | P15318.2 |
| | PERTUSSIS | | | |
| 1227 | BORDETELLA | LSLGKGFASL | 2110 | P15318.2 |
| | PERTUSSIS | | | |
| 1228 | BORDETELLA | LSPMEIYGL | 2111 | P15318.2 |
| | PERTUSSIS | | | |
| 1229 | BORDETELLA | NAHDNFLAGG | 2112 | P15318.2 |
| | PERTUSSIS | | | |
| 1230 | BORDETELLA | NANVYREGV | 2113 | P15318.2 |
| | PERTUSSIS | | | |
| 1231 | BORDETELLA | NDTLYGGL | 2114 | P15318.2 |
| | PERTUSSIS | | | |
| 1232 | BORDETELLA | NGLAGNDVL | 2115 | P15318.2 |
| | PERTUSSIS | | | |
| 1233 | BORDETELLA | NNANVYREGV | 2116 | P15318.2 |
| | PERTUSSIS | | | |
| 1234 | BORDETELLA | NTVSYAAL | 2117 | P15318.2 |
| | PERTUSSIS | | | |
| 1235 | BORDETELLA | NVLRNIENAV | 2118 | P15318.2 |
| | PERTUSSIS | | | |
| 1236 | BORDETELLA | PALTFITPL | 2119 | P15318.2 |
| | PERTUSSIS | | | |
| 1237 | BORDETELLA | PETSNVLRNI | 2120 | P15318.2 |
| | PERTUSSIS | | | |
| 1238 | BORDETELLA | PMEIYGLV | 2121 | P15318.2 |
| | PERTUSSIS | | | |
| 1239 | BORDETELLA | PQAYFEKNL | 2122 | P15318.2 |
| | PERTUSSIS | | | |
| 1240 | BORDETELLA | PVNPNLSKL | 2123 | P15318.2 |
| | PERTUSSIS | | | |
| 1241 | BORDETELLA | QAGWNASSV | 2124 | P15318.2 |
| | PERTUSSIS | | | |
| 1242 | BORDETELLA | QAGWNASSVI | 2125 | P15318.2 |
| | PERTUSSIS | | | |
| 1243 | BORDETELLA | QDAANAGNL | 2126 | P15318.2 |
| | PERTUSSIS | | | |
| 1244 | BORDETELLA | QDAANAGNLL | 2127 | P15318.2 |
| | PERTUSSIS | | | |
| 1245 | BORDETELLA | QDSGYDSL | 2128 | P15318.2 |
| | PERTUSSIS | | | |
| 1246 | BORDETELLA | QQSHYADQL | 2129 | P15318.2 |
| | PERTUSSIS | | | |
| 1247 | BORDETELLA | RALQGAQAV | 2130 | P15318.2 |
| | PERTUSSIS | | | |
| 1248 | BORDETELLA | RGGLGLDTL | 2131 | P15318.2 |
| | PERTUSSIS | | | |
| 1249 | BORDETELLA | RKQLNNANV | 2132 | P15318.2 |
| | PERTUSSIS | | | |
| 1250 | BORDETELLA | RQDSGYDSL | 2133 | P15318.2 |
| | PERTUSSIS | | | |
| 1251 | BORDETELLA | RQFRYDGDM | 2134 | P15318.2 |
| | PERTUSSIS | | | |
| 1252 | BORDETELLA | RSKFSPDVL | 2135 | P15318.2 |
| | PERTUSSIS | | | |
| 1253 | BORDETELLA | SAGAAAGAL | 2136 | P15318.2 |
| | PERTUSSIS | | | |
| 1254 | BORDETELLA | SAHWGQRAL | 2137 | P15318.2 |
| | PERTUSSIS | | | |
| 1255 | BORDETELLA | SAMIHPGRI | 2138 | P15318.2 |
| | PERTUSSIS | | | |
| 1256 | BORDETELLA | SAMIHPGRIV | 2139 | P15318.2 |
| | PERTUSSIS | | | |
| 1257 | BORDETELLA | SAYDTVSGI | 2140 | P15318.2 |
| | PERTUSSIS | | | |
| 1258 | BORDETELLA | SAYGYEGD | 2141 | P15318.2 |
| | PERTUSSIS | | | |
| 1259 | BORDETELLA | SGGAGDDVL | 2142 | P15318.2 |
| | PERTUSSIS | | | |
| 1260 | BORDETELLA | SGLQVAGA | 2143 | P15318.2 |
| | PERTUSSIS | | | |
| 1261 | BORDETELLA | SGYDSLDGV | 2144 | P15318.2 |
| | PERTUSSIS | | | |
| 1262 | BORDETELLA | SLLTGALNGI | 2145 | P15318.2 |
| | PERTUSSIS | | | |
| 1263 | BORDETELLA | SPMEIYGL | 2146 | P15318.2 |
| | PERTUSSIS | | | |
| 1264 | BORDETELLA | SQMLTRGQL | 2147 | P15318.2 |
| | PERTUSSIS | | | |
| 1265 | BORDETELLA | SSAYDTVSGI | 2148 | P15318.2 |
| | PERTUSSIS | | | |
| 1266 | BORDETELLA | SSLAHGHTA | 2149 | P15318.2 |
| | PERTUSSIS | | | |
| 1267 | BORDETELLA | SSVTSGDSV | 2150 | P15318.2 |
| | PERTUSSIS | | | |
| 1268 | BORDETELLA | SVIGVQTTEI | 2151 | P15318.2 |
| | PERTUSSIS | | | |
| 1269 | BORDETELLA | TNTVSYAAL | 2152 | P15318.2 |
| | PERTUSSIS | | | |
| 1270 | BORDETELLA | TSLIAEGV | 2153 | P15318.2 |
| | PERTUSSIS | | | |
| 1271 | BORDETELLA | TSLLTGAL | 2154 | P15318.2 |
| | PERTUSSIS | | | |
| 1272 | BORDETELLA | TVPASPGL | 2155 | P15318.2 |
| | PERTUSSIS | | | |
| 1273 | BORDETELLA | VAKEKNATL | 2156 | P15318.2 |
| | PERTUSSIS | | | |
| 1274 | BORDETELLA | VAPHEYGFGI | 2157 | P15318.2 |
| | PERTUSSIS | | | |
| 1275 | BORDETELLA | VAVVTSLL | 2158 | P15318.2 |
| | PERTUSSIS | | | |
| 1276 | BORDETELLA | VFYENRAYG | 2159 | P15318.2 |
| | PERTUSSIS | | | |
| 1277 | BORDETELLA | VFYENRAYGV | 2160 | P15318.2 |
| | PERTUSSIS | | | |
| 1278 | BORDETELLA | VITDFELEV | 2161 | P15318.2 |
| | PERTUSSIS | | | |
| 1279 | BORDETELLA | VNPHSTSL | 2162 | P15318.2 |
| | PERTUSSIS | | | |
| 1280 | BORDETELLA | VNPHSTSLI | 2163 | P15318.2 |
| | PERTUSSIS | | | |
| 1281 | BORDETELLA | VNPNLSKL | 2164 | P15318.2 |
| | PERTUSSIS | | | |
| 1282 | BORDETELLA | VNPNLSKLF | 2165 | P15318.2 |
| | PERTUSSIS | | | |
| 1283 | BORDETELLA | VQQPIIEKL | 2166 | P15318.2 |
| | PERTUSSIS | | | |
| 1284 | BORDETELLA | VQYRHVEL | 2167 | P15318.2 |
| | PERTUSSIS | | | |
| 1285 | BORDETELLA | VSIAAAASV | 2168 | P15318.2 |
| | PERTUSSIS | | | |
| 1286 | BORDETELLA | VSIAAAASVV | 2169 | P15318.2 |
| | PERTUSSIS | | | |
| 1287 | BORDETELLA | VTSLLTGAL | 2170 | P15318.2 |
| | PERTUSSIS | | | |
| 1288 | BORDETELLA | VVLANASRI | 2171 | P15318.2 |
| | PERTUSSIS | | | |
| 1289 | BORDETELLA | WPALNLFSV | 2172 | P15318.2 |
| | PERTUSSIS | | | |
| 1290 | BORDETELLA | WVRKASAL | 2173 | P15318.2 |
| | PERTUSSIS | | | |
| 1291 | BORDETELLA | YAVQYRRKGG | 2174 | P15318.2 |
| | PERTUSSIS | | | |
| 1292 | BORDETELLA | YGGLGDDTL | 2175 | P15318.2 |
| | PERTUSSIS | | | |
| 1293 | BORDETELLA | YGLVQQSHYA | 2176 | P15318.2 |
| | PERTUSSIS | | | |
| 1294 | BORDETELLA | YGYEGDALL | 2177 | P15318.2 |
| | PERTUSSIS | | | |
| 1295 | BORDETELLA | YIPVNPNL | 2178 | P15318.2 |
| | PERTUSSIS | | | |
| 1296 | BORDETELLA | YSAMIHPGRI | 2179 | P15318.2 |
| | PERTUSSIS | | | |
| 1297 | BORDETELLA | YSQTGAHAGI | 2180 | P15318.2 |
| | PERTUSSIS | | | |
| 1298 | CORYNEBACTERIUM | AYNFVESIINLFQVVHNSYN | 2181 | CAE11230.1 |
| | DIPHTHERIAE | | | |
| 1299 | BORDETELLA | SGTTIK | 2182 | BAF35031.1 |
| | PERTUSSIS | | | |
| 1300 | BORDETELLA | RGHTLESAEGRKIFG | 2183 | AAA22974.1 |
| | PERTUSSIS | | | |
| 1301 | BORDETELLA | AGAMTVRDVAAAADLALQAGDA | 2184 | AAA22974.1 |
| | PERTUSSIS | | | |
| 1302 | BORDETELLA | AGAMTVRDVAAAADLALQAGDAL | 2185 | AAA22974.1 |
| | PERTUSSIS | | | |
| 1303 | BORDETELLA | ALAAVLVNPHIFTRIGAAQTSLADGA | 2186 | AAA22974.1 |
| | PERTUSSIS | AGPA | | |
| 1304 | BORDETELLA | ALSIDSMTALGA | 2187 | AAA22974.1 |
| | PERTUSSIS | | | |
| 1305 | BORDETELLA | DLSAARGADISGEGR | 2188 | AAA22974.1 |
| | PERTUSSIS | | | |
| 1306 | BORDETELLA | DQNRYEYIWGLY | 2189 | AAA22974.1 |
| | PERTUSSIS | | | |
| 1307 | BORDETELLA | DYTVSADAIALA | 2190 | AAA22974.1 |
| | PERTUSSIS | | | |
| 1308 | BORDETELLA | GPIVVEAGELVSHAGG | 2191 | AAA22974.1 |
| | PERTUSSIS | | | |
| 1309 | BORDETELLA | GRPEGLKIGAHSATSVSGSFDAL | 2192 | AAA22974.1 |
| | PERTUSSIS | | | |
| 1310 | BORDETELLA | ITVTSRGGFDNEGKMESNK | 2193 | AAA22974.1 |
| | PERTUSSIS | | | |
| 1311 | BORDETELLA | LDQNRYEYIWGLYP | 2194 | AAA22974.1 |
| | PERTUSSIS | | | |
| 1312 | BORDETELLA | LSAARGADISG | 2195 | AAA22974.1 |
| | PERTUSSIS | | | |
| 1313 | BORDETELLA | NKIRLMGPLQ | 2196 | AAA22974.1 |
| | PERTUSSIS | | | |
| 1314 | BORDETELLA | NKLGRIRAGEDM | 2197 | AAA22974.1 |
| | PERTUSSIS | | | |
| 1315 | BORDETELLA | NKLGRIRAGEDMHLDAPRIE | 2198 | AAA22974.1 |
| | PERTUSSIS | | | |
| 1316 | BORDETELLA | PHLRNTGQVVAG | 2199 | AAA22974.1 |
| | PERTUSSIS | | | |
| 1317 | BORDETELLA | QVDLHDLSAARGADISG | 2200 | AAA22974.1 |
| | PERTUSSIS | | | |
| 1318 | BORDETELLA | RDVAAAADLALQ | 2201 | AAA22974.1 |
| | PERTUSSIS | | | |
| 1319 | BORDETELLA | SAARGADISGEG | 2202 | AAA22974.1 |
| | PERTUSSIS | | | |
| 1320 | BORDETELLA | TKGEMQIAGKGGGSP | 2203 | AAA22974.1 |
| | PERTUSSIS | | | |
| 1321 | BORDETELLA | TVSADAIALAAQ | 2204 | AAA22974.1 |
| | PERTUSSIS | | | |
| 1322 | BORDETELLA | VVAGHDIHI | 2205 | AAA22974.1 |
| | PERTUSSIS | | | |
| 1323 | BORDETELLA | PSGPNHTKVVQLPKISKNALKANG | 2206 | CAD12823.1 |
| | PERTUSSIS | | | |
| 1324 | RUBELLA VIRUS | LVGATPERPRLRLVDADDPLLRTAPG | 2207 | BAA19902.1 |
| | | PGEVWVTPVIGSQAR | | |
| 1325 | RUBELLA VIRUS | QQSRWGLGSPNCHGPDWASPVCQRH | 2208 | BAA19902.1 |
| | | SP | | |
| 1326 | BORDETELLA | AGEAMVLVYYESIAYSF | 2209 | ACI04548.1 |
| | PERTUSSIS | | | |
| 1327 | BORDETELLA | GGVGLASTLWYAESNALSKRLGEL | 2210 | AAZ74322.1 |
| | PERTUSSIS | | | |
| 1328 | BORDETELLA | GTLVRIAPVIGACMARQA | 2211 | ACI04548.1 |
| | PERTUSSIS | | | |
| 1329 | BORDETELLA | IRRVTRVYHNGITGETTT | 2212 | ACI04548.1 |
| | PERTUSSIS | | | |
| 1330 | BORDETELLA | IVKTGERQHGIHIQGSDP | 2213 | AAZ74322.1 |
| | PERTUSSIS | | | |
| 1331 | BORDETELLA | IVKTGERQHGIHIQGSDPGGVRTA | 2214 | AAZ74338.1 |
| | PERTUSSIS | | | |
| 1332 | BORDETELLA | LRDTNVTAVPASGAPAAVSVLGAS | 2215 | AAZ74338.1 |
| | PERTUSSIS | | | |
| 1333 | BORDETELLA | PEAPAPQPPAGRELSAAANAAVNT | 2216 | AAZ74322.1 |
| | PERTUSSIS | | | |
| 1334 | BORDETELLA | AAADFAHAE | 2217 | WP_019247158.1 |
| | PERTUSSIS | | | |
| 1335 | BORDETELLA | AAAEVAGAL | 2218 | WP_019249248.1 |
| | PERTUSSIS | | | |
| 1336 | BORDETELLA | AAESTFESY | 2219 | WP_019247158.1 |
| | PERTUSSIS | | | |
| 1337 | BORDETELLA | AAGFDPEVQ | 2220 | WP_019248145.1 |
| | PERTUSSIS | | | |
| 1338 | BORDETELLA | AALGRGHSL | 2221 | AGS56996.1 |
| | PERTUSSIS | | | |
| 1339 | BORDETELLA | AAMQGAVVH | 2222 | AGT50936.1 |
| | PERTUSSIS | | | |
| 1340 | BORDETELLA | AAPAAHADW | 2223 | AGS56996.1 |
| | PERTUSSIS | | | |
| 1341 | BORDETELLA | AAQATVVQR | 2224 | WP_019247158.1 |
| | PERTUSSIS | | | |
| 1342 | BORDETELLA | AARVAGDNY | 2225 | WP_019249248.1 |
| | PERTUSSIS | | | |
| 1343 | BORDETELLA | AAVALLNKL | 2226 | WP_019249248.1 |
| | PERTUSSIS | | | |
| 1344 | BORDETELLA | ADDPPATVY | 2227 | AAW72734.1 |
| | PERTUSSIS | | | |
| 1345 | BORDETELLA | AEAGRFKVL | 2228 | AGS56996.1 |
| | PERTUSSIS | | | |
| 1346 | BORDETELLA | AEATQLVTA | 2229 | WP_019247158.1 |
| | PERTUSSIS | | | |
| 1347 | BORDETELLA | AEGGATLGA | 2230 | WP_019249248.1 |
| | PERTUSSIS | | | |
| 1348 | BORDETELLA | AEHGEVSIQ | 2231 | WP_019249248.1 |
| | PERTUSSIS | | | |
| 1349 | BORDETELLA | AEIAFYPKE | 2232 | WP_019249248.1 |
| | PERTUSSIS | | | |
| 1350 | BORDETELLA | AEKVTTPAV | 2233 | WP_019247158.1 |
| | PERTUSSIS | | | |
| 1351 | BORDETELLA | AELQTYLRQ | 2234 | 1BCP_C |
| | PERTUSSIS | | | |
| 1352 | BORDETELLA | AEQSLIEVG | 2235 | WP_019249248.1 |
| | PERTUSSIS | | | |
| 1353 | BORDETELLA | AESNALSKR | 2236 | AGS56996.1 |
| | PERTUSSIS | | | |
| 1354 | BORDETELLA | AESSEAMAA | 2237 | AFK26302.1 |
| | PERTUSSIS | | | |
| 1355 | BORDETELLA | AEVKVGYRA | 2238 | WP_019247158.1 |
| | PERTUSSIS | | | |
| 1356 | BORDETELLA | AEVTDTSPS | 2239 | WP_019249248.1 |
| | PERTUSSIS | | | |
| 1357 | BORDETELLA | AGKSLKKKN | 2240 | WP_019247158.1 |
| | PERTUSSIS | | | |
| 1358 | BORDETELLA | AGLAGPSAV | 2241 | WP_019249248.1 |
| | PERTUSSIS | | | |
| 1359 | BORDETELLA | AIRVGRGAR | 2242 | AGT50936.1 |
| | PERTUSSIS | | | |
| 1360 | BORDETELLA | ALAAIASAA | 2243 | WP_019248145.1 |
| | PERTUSSIS | | | |
| 1361 | BORDETELLA | ALADVPYVL | 2244 | AAA22983.1 |
| | PERTUSSIS | | | |
| 1362 | BORDETELLA | ALANDGTIV | 2245 | WP_019248658.1 |
| | PERTUSSIS | | | |
| 1363 | BORDETELLA | ALGRGHSLY | 2246 | AGS56996.1 |
| | PERTUSSIS | | | |
| 1364 | BORDETELLA | ALILAASPV | 2247 | WP_019248658.1 |
| | PERTUSSIS | | | |
| 1365 | BORDETELLA | ALMLACTGL | 2248 | AAA22974.1 |
| | PERTUSSIS | | | |
| 1366 | BORDETELLA | AMQGAVVHL | 2249 | AGT50936.1 |
| | PERTUSSIS | | | |
| 1367 | BORDETELLA | AMTHLSPAL | 2250 | AAA22983.1 |
| | PERTUSSIS | | | |
| 1368 | BORDETELLA | AMYGKHITL | 2251 | WP_019249248.1 |
| | PERTUSSIS | | | |
| 1369 | BORDETELLA | ANEANALLW | 2252 | WP_019249248.1 |
| | PERTUSSIS | | | |
| 1370 | BORDETELLA | APLSITLQA | 2253 | AGT50936.1 |
| | PERTUSSIS | | | |
| 1371 | BORDETELLA | APNALAWAL | 2254 | AAA22974.1 |
| | PERTUSSIS | | | |
| 1372 | BORDETELLA | APPAPKPAP | 2255 | AGS56996.1 |
| | PERTUSSIS | | | |
| 1373 | BORDETELLA | APPGAGFIY | 2256 | 1BCP_C |
| | PERTUSSIS | | | |
| 1374 | BORDETELLA | APQAAPLSI | 2257 | AGT50936.1 |
| | PERTUSSIS | | | |
| 1375 | BORDETELLA | APRIENTAK | 2258 | WP_019249248.1 |
| | PERTUSSIS | | | |
| 1376 | BORDETELLA | AQGKALLYR | 2259 | AGT50936.1 |
| | PERTUSSIS | | | |
| 1377 | BORDETELLA | AQITSYVGF | 2260 | WP_019248658.1 |
| | PERTUSSIS | | | |
| 1378 | BORDETELLA | AQLEVRGQR | 2261 | WP_019249248.1 |
| | PERTUSSIS | | | |
| 1379 | BORDETELLA | AQQLKQADR | 2262 | WP_019247699.1 |
| | PERTUSSIS | | | |
| 1380 | BORDETELLA | AQVTVAGRY | 2263 | WP_019249248.1 |
| | PERTUSSIS | | | |
| 1381 | BORDETELLA | ARRSRVRAL | 2264 | NP_882284.1 |
| | PERTUSSIS | | | |
| 1382 | BORDETELLA | ASPRRARRA | 2265 | WP_019249248.1 |
| | PERTUSSIS | | | |
| 1383 | BORDETELLA | ASSPDAHVP | 2266 | AAA22983.1 |
| | PERTUSSIS | | | |
| 1384 | BORDETELLA | ASVSNPGTF | 2267 | WP_019249248.1 |
| | PERTUSSIS | | | |
| 1385 | BORDETELLA | ATWNFQSTY | 2268 | WP_019249248.1 |
| | PERTUSSIS | | | |
| 1386 | BORDETELLA | ATYIADSGF | 2269 | AGS56996.1 |
| | PERTUSSIS | | | |
| 1387 | BORDETELLA | AVAAPAVGA | 2270 | WP_019249248.1 |
| | PERTUSSIS | | | |
| 1388 | BORDETELLA | AVFMQQRPL | 2271 | AAA22983.1 |
| | PERTUSSIS | | | |
| 1389 | BORDETELLA | AVLVNPHIF | 2272 | WP_019249248.1 |
| | PERTUSSIS | | | |
| 1390 | BORDETELLA | CFGKDLKRP | 2273 | AAA22983.1 |
| | PERTUSSIS | | | |
| 1391 | BORDETELLA | CPSSLGNGV | 2274 | WP_019248145.1 |
| | PERTUSSIS | | | |
| 1392 | BORDETELLA | DAGHEHDTW | 2275 | AAA22984.1 |
| | PERTUSSIS | | | |
| 1393 | BORDETELLA | DAKHDLTVT | 2276 | WP_019249248.1 |
| | PERTUSSIS | | | |
| 1394 | BORDETELLA | DASGQHRLW | 2277 | AGS56996.1 |
| | PERTUSSIS | | | |
| 1395 | BORDETELLA | DATFETYAL | 2278 | YP_006628018.1 |
| | PERTUSSIS | | | |
| 1396 | BORDETELLA | DATFQTYAL | 2279 | 1BCP_C |
| | PERTUSSIS | | | |
| 1397 | BORDETELLA | DATLVGAKF | 2280 | WP_019247158.1 |
| | PERTUSSIS | | | |
| 1398 | BORDETELLA | DDEVDVSGR | 2281 | AAA22974.1 |
| | PERTUSSIS | | | |
| 1399 | BORDETELLA | DENGKPQTY | 2282 | WP_019247158.1 |
| | PERTUSSIS | | | |
| 1400 | BORDETELLA | DGPPSRPTT | 2283 | WP_019247158.1 |
| | PERTUSSIS | | | |
| 1401 | BORDETELLA | DHLTGRSCQ | 2284 | AAW72734.1 |
| | PERTUSSIS | | | |
| 1402 | BORDETELLA | DNEGKMESN | 2285 | WP_019249248.1 |
| | PERTUSSIS | | | |
| 1403 | BORDETELLA | DPPATVYRY | 2286 | AAW72734.1 |
| | PERTUSSIS | | | |
| 1404 | BORDETELLA | EATEGDATL | 2287 | WP_019247158.1 |
| | PERTUSSIS | | | |
| 1405 | BORDETELLA | EATQQAAGF | 2288 | WP_019248145.1 |
| | PERTUSSIS | | | |
| 1406 | BORDETELLA | ECSGKQDCP | 2289 | AAA22983.1 |
| | PERTUSSIS | | | |
| 1407 | BORDETELLA | EGGKLRGKD | 2290 | AAA22974.1 |
| | PERTUSSIS | | | |
| 1408 | BORDETELLA | EGKMESNKD | 2291 | WP_019249248.1 |
| | PERTUSSIS | | | |
| 1409 | BORDETELLA | EHRMQEAVE | 2292 | AAW72734.1 |
| | PERTUSSIS | | | |
| 1410 | BORDETELLA | EKRLDIDDA | 2293 | WP_019249248.1 |
| | PERTUSSIS | | | |
| 1411 | BORDETELLA | EPASANTLL | 2294 | AGS56996.1 |
| | PERTUSSIS | | | |
| 1412 | BORDETELLA | EPQAELAVF | 2295 | AGS56996.1 |
| | PERTUSSIS | | | |
| 1413 | BORDETELLA | EPVKLTLTG | 2296 | AGT50936.1 |
| | PERTUSSIS | | | |
| 1414 | BORDETELLA | ESAEGRKIF | 2297 | WP_019249248.1 |
| | PERTUSSIS | | | |
| 1415 | BORDETELLA | ESYSESHNF | 2298 | WP_019247158.1 |
| | PERTUSSIS | | | |
| 1416 | BORDETELLA | ETFCITTIY | 2299 | 1BCP_C |
| | PERTUSSIS | | | |
| 1417 | BORDETELLA | EVAGALELS | 2300 | WP_019249248.1 |
| | PERTUSSIS | | | |
| 1418 | BORDETELLA | EVAKVEVVP | 2301 | WP_019247158.1 |
| | PERTUSSIS | | | |
| 1419 | BORDETELLA | EVDGIIQEF | 2302 | WP_019249248.1 |
| | PERTUSSIS | | | |
| 1420 | BORDETELLA | EVRADNNFY | 2303 | WP_019248344.1 |
| | PERTUSSIS | | | |
| 1421 | BORDETELLA | FAILSSTTE | 2304 | WP_019247158.1 |
| | PERTUSSIS | | | |
| 1422 | BORDETELLA | FAISAYALK | 2305 | AAA22984.1 |
| | PERTUSSIS | | | |
| 1423 | BORDETELLA | FALYDGTYL | 2306 | AFK26303.1 |
| | PERTUSSIS | | | |
| 1424 | BORDETELLA | FDTMLGFAI | 2307 | AAA22984.1 |
| | PERTUSSIS | | | |
| 1425 | BORDETELLA | FEGKPALEL | 2308 | AAA22983.1 |
| | PERTUSSIS | | | |
| 1426 | BORDETELLA | FELGADHAV | 2309 | AGS56996.1 |
| | PERTUSSIS | | | |
| 1427 | BORDETELLA | FEPGITTNY | 2310 | WP_019248658.1 |
| | PERTUSSIS | | | |
| 1428 | BORDETELLA | FETYALTGI | 2311 | YP_006628018.1 |
| | PERTUSSIS | | | |
| 1429 | BORDETELLA | FIYRETFCI | 2312 | 1BCP_C |
| | PERTUSSIS | | | |
| 1430 | BORDETELLA | FPTRTTAPG | 2313 | NP_882284.1 |
| | PERTUSSIS | | | |
| 1431 | BORDETELLA | FQTYALTGI | 2314 | 1BCP_C |
| | PERTUSSIS | | | |
| 1432 | BORDETELLA | FTHADGWFL | 2315 | AGS56996.1 |
| | PERTUSSIS | | | |
| 1433 | BORDETELLA | FVRDGQSVI | 2316 | 1BCP_C |
| | PERTUSSIS | | | |
| 1434 | BORDETELLA | FVRSGQPVI | 2317 | YP_006628018.1 |
| | PERTUSSIS | | | |
| 1435 | BORDETELLA | FVWYVDTVI | 2318 | WP_019248866.1 |
| | PERTUSSIS | | | |
| 1436 | BORDETELLA | GAASSRQAL | 2319 | WP_019249248.1 |
| | PERTUSSIS | | | |
| 1437 | BORDETELLA | GAASSYFEY | 2320 | AAW72734.1 |
| | PERTUSSIS | | | |
| 1438 | BORDETELLA | GAFDLKTTF | 2321 | AFK26303.1 |
| | PERTUSSIS | | | |
| 1439 | BORDETELLA | GAPAAVSVL | 2322 | AGS56996.1 |
| | PERTUSSIS | | | |
| 1440 | BORDETELLA | GATRAVDSL | 2323 | AGS56996.1 |
| | PERTUSSIS | | | |
| 1441 | BORDETELLA | GAVPGGAVP | 2324 | AGT50936.1 |
| | PERTUSSIS | | | |
| 1442 | BORDETELLA | GEAMVLVYY | 2325 | AFK26302.1 |
| | PERTUSSIS | | | |
| 1443 | BORDETELLA | GEIALGDAT | 2326 | WP_019249248.1 |
| | PERTUSSIS | | | |
| 1444 | BORDETELLA | GELMAAQVA | 2327 | WP_019247158.1 |
| | PERTUSSIS | | | |
| 1445 | BORDETELLA | GGVPGGAVP | 2328 | AAZ74338.1 |
| | PERTUSSIS | | | |
| 1446 | BORDETELLA | GHEHDTWFD | 2329 | AAA22984.1 |
| | PERTUSSIS | | | |
| 1447 | BORDETELLA | GIGALKAGA | 2330 | WP_019249248.1 |
| | PERTUSSIS | | | |
| 1448 | BORDETELLA | GIVIPPKAL | 2331 | 1BCP_C |
| | PERTUSSIS | | | |
| 1449 | BORDETELLA | GKDLKRPGS | 2332 | AAA22983.1 |
| | PERTUSSIS | | | |
| 1450 | BORDETELLA | GKLPKPVTV | 2333 | WP_019247158.1 |
| | PERTUSSIS | | | |
| 1451 | BORDETELLA | GKSLKKKNQ | 2334 | WP_019247158.1 |
| | PERTUSSIS | | | |
| 1452 | BORDETELLA | GLDVQQGTV | 2335 | WP_019249248.1 |
| | PERTUSSIS | | | |
| 1453 | BORDETELLA | GLTDGVSRI | 2336 | WP_019249248.1 |
| | PERTUSSIS | | | |
| 1454 | BORDETELLA | GLYPTYTEW | 2337 | WP_019249248.1 |
| | PERTUSSIS | | | |
| 1455 | BORDETELLA | GLYQTYTEW | 2338 | YP_006626470.1 |
| | PERTUSSIS | | | |
| 1456 | BORDETELLA | GPPSRPTTP | 2339 | WP_019247158.1 |
| | PERTUSSIS | | | |
| 1457 | BORDETELLA | GPSAVAAPA | 2340 | WP_019249248.1 |
| | PERTUSSIS | | | |
| 1458 | BORDETELLA | GVAPTAQQL | 2341 | WP_019248866.1 |
| | PERTUSSIS | | | |
| 1459 | BORDETELLA | GVGLASTLW | 2342 | AGS56996.1 |
| | PERTUSSIS | | | |
| 1460 | BORDETELLA | GYEAGFSLG | 2343 | WP_019247158.1 |
| | PERTUSSIS | | | |
| 1461 | BORDETELLA | HADDGTIVI | 2344 | WP_019248145.1 |
| | PERTUSSIS | | | |
| 1462 | BORDETELLA | HADWNNQSI | 2345 | AGS56996.1 |
| | PERTUSSIS | | | |
| 1463 | BORDETELLA | HAEHEKDVR | 2346 | WP_019247158.1 |
| | PERTUSSIS | | | |
| 1464 | BORDETELLA | HANHYGTRI | 2347 | WP_019247158.1 |
| | PERTUSSIS | | | |
| 1465 | BORDETELLA | HAQGKALLY | 2348 | AGT50936.1 |
| | PERTUSSIS | | | |
| 1466 | BORDETELLA | HFIGYIYEV | 2349 | AAW72734.1 |
| | PERTUSSIS | | | |
| 1467 | BORDETELLA | HLSPALADV | 2350 | AAA22983.1 |
| | PERTUSSIS | | | |
| 1468 | BORDETELLA | HSLYASYEY | 2351 | AGS56996.1 |
| | PERTUSSIS | | | |
| 1469 | BORDETELLA | HVRGMLVPV | 2352 | AAA22974.1 |
| | PERTUSSIS | | | |
| 1470 | BORDETELLA | HVSKEEQYY | 2353 | YP_006628018.1 |
| | PERTUSSIS | | | |
| 1471 | BORDETELLA | HVTRGWSIF | 2354 | AFK26303.1 |
| | PERTUSSIS | | | |
| 1472 | BORDETELLA | IADSGFYLD | 2355 | AGS56996.1 |
| | PERTUSSIS | | | |
| 1473 | BORDETELLA | IAHRTELRG | 2356 | AGS56996.1 |
| | PERTUSSIS | | | |
| 1474 | BORDETELLA | IENTAKLSG | 2357 | WP_019249248.1 |
| | PERTUSSIS | | | |
| 1475 | BORDETELLA | IESKISQSV | 2358 | WP_019249248.1 |
| | PERTUSSIS | | | |
| 1476 | BORDETELLA | IETGGARRF | 2359 | AGT50936.1 |
| | PERTUSSIS | | | |
| 1477 | BORDETELLA | IIKDAPPGA | 2360 | 1BCP_C |
| | PERTUSSIS | | | |
| 1478 | BORDETELLA | IIQEFAADL | 2361 | WP_019249248.1 |
| | PERTUSSIS | | | |
| 1479 | BORDETELLA | ILAGALATY | 2362 | AAW72734.1 |
| | PERTUSSIS | | | |
| 1480 | BORDETELLA | ILLENPAAE | 2363 | AGS56996.1 |
| | PERTUSSIS | | | |
| 1481 | BORDETELLA | ILPILVLAL | 2364 | NP_882286.1 |
| | PERTUSSIS | | | |
| 1482 | BORDETELLA | IPFQRALRL | 2365 | WP_019248145.1 |
| | PERTUSSIS | | | |
| 1483 | BORDETELLA | ISVRVHVSK | 2366 | YP_006628018.1 |
| | PERTUSSIS | | | |
| 1484 | BORDETELLA | ITNETGKTY | 2367 | WP_019247158.1 |
| | PERTUSSIS | | | |
| 1485 | BORDETELLA | ITNKRAALI | 2368 | WP_019249248.1 |
| | PERTUSSIS | | | |
| 1486 | BORDETELLA | ITSYVGFSV | 2369 | WP_019248658.1 |
| | PERTUSSIS | | | |
| 1487 | BORDETELLA | ITVTSRGGF | 2370 | WP_019249248.1 |
| | PERTUSSIS | | | |
| 1488 | BORDETELLA | IVIPPKALF | 2371 | 1BCP_C |
| | PERTUSSIS | | | |
| 1489 | BORDETELLA | IVVEAGELV | 2372 | WP_019249248.1 |
| | PERTUSSIS | | | |
| 1490 | BORDETELLA | KAAKSVNLM | 2373 | WP_019247158.1 |
| | PERTUSSIS | | | |
| 1491 | BORDETELLA | KAAPLRRTT | 2374 | AGS56996.1 |
| | PERTUSSIS | | | |
| 1492 | BORDETELLA | KAGKLSATG | 2375 | WP_019249248.1 |
| | PERTUSSIS | | | |
| 1493 | BORDETELLA | KAGTIAAPW | 2376 | WP_019249248.1 |
| | PERTUSSIS | | | |
| 1494 | BORDETELLA | KAKSLTTEI | 2377 | WP_019249248.1 |
| | PERTUSSIS | | | |
| 1495 | BORDETELLA | KATVTTVQV | 2378 | WP_019247158.1 |
| | PERTUSSIS | | | |
| 1496 | BORDETELLA | KDYRDKDGG | 2379 | WP_019247158.1 |
| | PERTUSSIS | | | |
| 1497 | BORDETELLA | KEAATIVAA | 2380 | WP_019249248.1 |
| | PERTUSSIS | | | |
| 1498 | BORDETELLA | KEDVDAAQI | 2381 | WP_019248658.1 |
| | PERTUSSIS | | | |
| 1499 | BORDETELLA | KEVDGIIQE | 2382 | WP_019249248.1 |
| | PERTUSSIS | | | |
| 1500 | BORDETELLA | KGPKLAMPW | 2383 | AGS56996.1 |
| | PERTUSSIS | | | |
| 1501 | BORDETELLA | KLASGGGAV | 2384 | WP_019249248.1 |
| | PERTUSSIS | | | |
| 1502 | BORDETELLA | KLKGKNQEF | 2385 | AAA22984.1 |
| | PERTUSSIS | | | |
| 1503 | BORDETELLA | KLLHHILPI | 2386 | NP_882286.1 |
| | PERTUSSIS | | | |
| 1504 | BORDETELLA | KPAPQPGPQ | 2387 | AGS56996.1 |
| | PERTUSSIS | | | |
| 1505 | BORDETELLA | KPAPTAPPM | 2388 | WP_019249248.1 |
| | PERTUSSIS | | | |
| 1506 | BORDETELLA | KPAVSVKVA | 2389 | WP_019249248.1 |
| | PERTUSSIS | | | |
| 1507 | BORDETELLA | KPDRAARVA | 2390 | WP_019249248.1 |
| | PERTUSSIS | | | |
| 1508 | BORDETELLA | KPLADIAVI | 2391 | YP_006626470.1 |
| | PERTUSSIS | | | |
| 1509 | BORDETELLA | KPLADIAVV | 2392 | WP_019249248.1 |
| | PERTUSSIS | | | |
| 1510 | BORDETELLA | KPLPKPLPV | 2393 | WP_019247158.1 |
| | PERTUSSIS | | | |
| 1511 | BORDETELLA | KQADRDFVW | 2394 | WP_019247699.1 |
| | PERTUSSIS | | | |
| 1512 | BORDETELLA | KSLPGGKLP | 2395 | WP_019247158.1 |
| | PERTUSSIS | | | |
| 1513 | BORDETELLA | KSYTLRYLA | 2396 | WP_019248658.1 |
| | PERTUSSIS | | | |
| 1514 | BORDETELLA | KTNMVVTSV | 2397 | AAA22983.1 |
| | PERTUSSIS | | | |
| 1515 | BORDETELLA | KVLAPRLYL | 2398 | AAA22974.1 |
| | PERTUSSIS | | | |
| 1516 | BORDETELLA | KVLSTKTTL | 2399 | WP_019247158.1 |
| | PERTUSSIS | | | |
| 1517 | BORDETELLA | LAAGAGLTL | 2400 | WP_019249248.1 |
| | PERTUSSIS | | | |
| 1518 | BORDETELLA | LAAIASAAH | 2401 | WP_019248145.1 |
| | PERTUSSIS | | | |
| 1519 | BORDETELLA | LAANGNGQW | 2402 | AGS56996.1 |
| | PERTUSSIS | | | |
| 1520 | BORDETELLA | LAAQVTQRG | 2403 | WP_019249248.1 |
| | PERTUSSIS | | | |
| 1521 | BORDETELLA | LAARGDGAL | 2404 | AAA22974.1 |
| | PERTUSSIS | | | |
| 1522 | BORDETELLA | LAAVLVNPH | 2405 | WP_019249248.1 |
| | PERTUSSIS | | | |
| 1523 | BORDETELLA | LAGSGLFRM | 2406 | AGS56996.1 |
| | PERTUSSIS | | | |
| 1524 | BORDETELLA | LAKALSAAL | 2407 | WP_019249248.1 |
| | PERTUSSIS | | | |
| 1525 | BORDETELLA | LALQAGDAL | 2408 | WP_019249248.1 |
| | PERTUSSIS | | | |
| 1526 | BORDETELLA | LAMPWTFHA | 2409 | AGS56996.1 |
| | PERTUSSIS | | | |
| 1527 | BORDETELLA | LANDGTIVI | 2410 | WP_019248658.1 |
| | PERTUSSIS | | | |
| 1528 | BORDETELLA | LAPTVGVAF | 2411 | WP_019247158.1 |
| | PERTUSSIS | | | |
| 1529 | BORDETELLA | LASDGSVDF | 2412 | AGS56996.1 |
| | PERTUSSIS | | | |
| 1530 | BORDETELLA | LATYQSEYL | 2413 | AAW72734.1 |
| | PERTUSSIS | | | |
| 1531 | BORDETELLA | LAWALMLAC | 2414 | AAA22974.1 |
| | PERTUSSIS | | | |
| 1532 | BORDETELLA | LEAGRRFTH | 2415 | AGS56996.1 |
| | PERTUSSIS | | | |
| 1533 | BORDETELLA | LFTQQGGAY | 2416 | 1BCP_C |
| | PERTUSSIS | | | |
| 1534 | BORDETELLA | LKRPGSSPM | 2417 | AAA22983.1 |
| | PERTUSSIS | | | |
| 1535 | BORDETELLA | LLGSHVARA | 2418 | AFK26303.1 |
| | PERTUSSIS | | | |
| 1536 | BORDETELLA | LLHHILPIL | 2419 | NP_882286.1 |
| | PERTUSSIS | | | |
| 1537 | BORDETELLA | LLNAGGTLL | 2420 | WP_019249248.1 |
| | PERTUSSIS | | | |
| 1538 | BORDETELLA | LMGPLQVNA | 2421 | WP_019249248.1 |
| | PERTUSSIS | | | |
| 1539 | BORDETELLA | LNDSKITMG | 2422 | WP_019248145.1 |
| | PERTUSSIS | | | |
| 1540 | BORDETELLA | LPEPVKLTL | 2423 | AGT50936.1 |
| | PERTUSSIS | | | |
| 1541 | BORDETELLA | LPILVLALL | 2424 | NP_882286.1 |
| | PERTUSSIS | | | |
| 1542 | BORDETELLA | LPKISKNAL | 2425 | WP_019248145.1 |
| | PERTUSSIS | | | |
| 1543 | BORDETELLA | LPKPVTVKL | 2426 | WP_019247158.1 |
| | PERTUSSIS | | | |
| 1544 | BORDETELLA | LPLKANPMH | 2427 | NP_882285.1 |
| | PERTUSSIS | | | |
| 1545 | BORDETELLA | LPPRPVVAE | 2428 | WP_019247158.1 |
| | PERTUSSIS | | | |
| 1546 | BORDETELLA | LPSIPGTSI | 2429 | AGS56996.1 |
| | PERTUSSIS | | | |
| 1547 | BORDETELLA | LPTHLYKNF | 2430 | AAA22984.1 |
| | PERTUSSIS | | | |
| 1548 | BORDETELLA | LPVRGVALV | 2431 | WP_019249248.1 |
| | PERTUSSIS | | | |
| 1549 | BORDETELLA | LPVSLTALD | 2432 | WP_019249248.1 |
| | PERTUSSIS | | | |
| 1550 | BORDETELLA | LQGGNKVPV | 2433 | WP_019249248.1 |
| | PERTUSSIS | | | |
| 1551 | BORDETELLA | LSAALGADW | 2434 | WP_019249248.1 |
| | PERTUSSIS | | | |
| 1552 | BORDETELLA | LSDAGHEHD | 2435 | AAA22984.1 |
| | PERTUSSIS | | | |
| 1553 | BORDETELLA | LSGEVQRKG | 2436 | WP_019249248.1 |
| | PERTUSSIS | | | |
| 1554 | BORDETELLA | LSSPSAITV | 2437 | WP_019249248.1 |
| | PERTUSSIS | | | |
| 1555 | BORDETELLA | LTWLAILAV | 2438 | AAW72734.1 |
| | PERTUSSIS | | | |
| 1556 | BORDETELLA | LVFSHVRGM | 2439 | AAA22974.1 |
| | PERTUSSIS | | | |
| 1557 | BORDETELLA | LVSDAGADL | 2440 | WP_019249248.1 |
| | PERTUSSIS | | | |
| 1558 | BORDETELLA | LVYYESIAY | 2441 | AFK26302.1 |
| | PERTUSSIS | | | |
| 1559 | BORDETELLA | MAAESTFES | 2442 | WP_019247158.1 |
| | PERTUSSIS | | | |
| 1560 | BORDETELLA | MAAGHDATL | 2443 | WP_019249248.1 |
| | PERTUSSIS | | | |
| 1561 | BORDETELLA | MAAWSERAG | 2444 | AFK26302.1 |
| | PERTUSSIS | | | |
| 1562 | BORDETELLA | MALGALGAA | 2445 | AGS56996.1 |
| | PERTUSSIS | | | |
| 1563 | BORDETELLA | MAPVMGACM | 2446 | ADA85123.1 |
| | PERTUSSIS | | | |
| 1564 | BORDETELLA | MATKGEMQI | 2447 | WP_019249248.1 |
| | PERTUSSIS | | | |
| 1565 | BORDETELLA | MDAKGGTLL | 2448 | WP_019249248.1 |
| | PERTUSSIS | | | |
| 1566 | BORDETELLA | MESNKDIVI | 2449 | WP_019249248.1 |
| | PERTUSSIS | | | |
| 1567 | BORDETELLA | MEVMLRAVF | 2450 | AAA22983.1 |
| | PERTUSSIS | | | |
| 1568 | BORDETELLA | MEYFKTPLP | 2451 | WP_019249248.1 |
| | PERTUSSIS | | | |
| 1569 | BORDETELLA | MHTIASILL | 2452 | AAA22984.1 |
| | PERTUSSIS | | | |
| 1570 | BORDETELLA | MIYMSGLAV | 2453 | 1BCP_C |
| | PERTUSSIS | | | |
| 1571 | BORDETELLA | MLACTGLPL | 2454 | AAA22974.1 |
| | PERTUSSIS | | | |
| 1572 | BORDETELLA | MPIDRKTLC | 2455 | AFK26303.1 |
| | PERTUSSIS | | | |
| 1573 | BORDETELLA | MPKAPELDL | 2456 | WP_019249248.1 |
| | PERTUSSIS | | | |
| 1574 | BORDETELLA | MQRQAGLPL | 2457 | NP_882285.1 |
| | PERTUSSIS | | | |
| 1575 | BORDETELLA | NALAWALML | 2458 | AAA22974.1 |
| | PERTUSSIS | | | |
| 1576 | BORDETELLA | NITNKRAAL | 2459 | WP_019249248.1 |
| | PERTUSSIS | | | |
| 1577 | BORDETELLA | NLMAAESTF | 2460 | WP_019247158.1 |
| | PERTUSSIS | | | |
| 1578 | BORDETELLA | NNETMSGRQ | 2461 | WP_019249248.1 |
| | PERTUSSIS | | | |
| 1579 | BORDETELLA | NPGSLIAEV | 2462 | WP_019249248.1 |
| | PERTUSSIS | | | |
| 1580 | BORDETELLA | NPMHTIASI | 2463 | NP_882285.1 |
| | PERTUSSIS | | | |
| 1581 | BORDETELLA | NPQTQLSNI | 2464 | WP_019248145.1 |
| | PERTUSSIS | | | |
| 1582 | BORDETELLA | NPYTSRRSV | 2465 | AFK26302.1 |
| | PERTUSSIS | | | |
| 1583 | BORDETELLA | PAPTAPPMP | 2466 | WP_019249248.1 |
| | PERTUSSIS | | | |
| 1584 | BORDETELLA | PASANTLLL | 2467 | AGS56996.1 |
| | PERTUSSIS | | | |
| 1585 | BORDETELLA | PAVALPRPL | 2468 | WP_019249248.1 |
| | PERTUSSIS | | | |
| 1586 | BORDETELLA | PDAHVPFCF | 2469 | AAA22983.1 |
| | PERTUSSIS | | | |
| 1587 | BORDETELLA | PELGAAIRV | 2470 | AGT50936.1 |
| | PERTUSSIS | | | |
| 1588 | BORDETELLA | PFIIKLKDC | 2471 | WP_019248145.1 |
| | PERTUSSIS | | | |
| 1589 | BORDETELLA | PGPQPPQPP | 2472 | AGS56996.1 |
| | PERTUSSIS | | | |
| 1590 | BORDETELLA | PGPQPPQPQ | 2473 | AAZ74338.1 |
| | PERTUSSIS | | | |
| 1591 | BORDETELLA | PGPTTDYST | 2474 | WP_019248145.1 |
| | PERTUSSIS | | | |
| 1592 | BORDETELLA | PGTFTAGKD | 2475 | WP_019249248.1 |
| | PERTUSSIS | | | |
| 1593 | BORDETELLA | PGTPGDLLE | 2476 | AAA22984.1 |
| | PERTUSSIS | | | |
| 1594 | BORDETELLA | PKPKPKAER | 2477 | WP_019247158.1 |
| | PERTUSSIS | | | |
| 1595 | BORDETELLA | PKPKPKPKA | 2478 | WP_019247158.1 |
| | PERTUSSIS | | | |
| 1596 | BORDETELLA | PKPKPKPKP | 2479 | WP_019247158.1 |
| | PERTUSSIS | | | |
| 1597 | BORDETELLA | PLPPRPVVA | 2480 | WP_019247158.1 |
| | PERTUSSIS | | | |
| 1598 | BORDETELLA | PPAPKPAPQ | 2481 | AGS56996.1 |
| | PERTUSSIS | | | |
| 1599 | BORDETELLA | PPKPAPVAK | 2482 | WP_019247158.1 |
| | PERTUSSIS | | | |
| 1600 | BORDETELLA | PPRPVAAQV | 2483 | WP_019247158.1 |
| | PERTUSSIS | | | |
| 1601 | BORDETELLA | PPRPVVAEK | 2484 | WP_019247158.1 |
| | PERTUSSIS | | | |
| 1602 | BORDETELLA | PPSRPTTPP | 2485 | WP_019247158.1 |
| | PERTUSSIS | | | |
| 1603 | BORDETELLA | PRRARRALR | 2486 | WP_019249248.1 |
| | PERTUSSIS | | | |
| 1604 | BORDETELLA | QAAPLSITL | 2487 | AGT50936.1 |
| | PERTUSSIS | | | |
| 1605 | BORDETELLA | QADRDFVWY | 2488 | WP_019247699.1 |
| | PERTUSSIS | | | |
| 1606 | BORDETELLA | QAIVVGKDL | 2489 | WP_019249248.1 |
| | PERTUSSIS | | | |
| 1607 | BORDETELLA | QALGALKLY | 2490 | ACI16088.1 |
| | PERTUSSIS | | | |
| 1608 | BORDETELLA | QELALKLKG | 2491 | AAA22984.1 |
| | PERTUSSIS | | | |
| 1609 | BORDETELLA | QITQHGGPY | 2492 | NP_882283.1 |
| | PERTUSSIS | | | |
| 1610 | BORDETELLA | QITQHGSPY | 2493 | AFK26303.1 |
| | PERTUSSIS | | | |
| 1611 | BORDETELLA | QPLPPRPVA | 2494 | WP_019247158.1 |
| | PERTUSSIS | | | |
| 1612 | BORDETELLA | QPPAGRELS | 2495 | AGS56996.1 |
| | PERTUSSIS | | | |
| 1613 | BORDETELLA | QQLKQADRD | 2496 | WP_019247699.1 |
| | PERTUSSIS | | | |
| 1614 | BORDETELLA | QQVQVLQRQ | 2497 | WP_019247158.1 |
| | PERTUSSIS | | | |
| 1615 | BORDETELLA | QSIVEAPEL | 2498 | AGT50936.1 |
| | PERTUSSIS | | | |
| 1616 | BORDETELLA | QVGSSNSAF | 2499 | AAW72734.1 |
| | PERTUSSIS | | | |
| 1617 | BORDETELLA | RAGLSPATW | 2500 | WP_019249248.1 |
| | PERTUSSIS | | | |
| 1618 | BORDETELLA | RARRALRQD | 2501 | WP_019249248.1 |
| | PERTUSSIS | | | |
| 1619 | BORDETELLA | RASASRARI | 2502 | WP_019249248.1 |
| | PERTUSSIS | | | |
| 1620 | BORDETELLA | RELSAAANA | 2503 | AGS56996.1 |
| | PERTUSSIS | | | |
| 1621 | BORDETELLA | RETFCITTI | 2504 | 1BCP_C |
| | PERTUSSIS | | | |
| 1622 | BORDETELLA | RGFAQRQQL | 2505 | AGS56996.1 |
| | PERTUSSIS | | | |
| 1623 | BORDETELLA | RGSAATFTL | 2506 | WP_019248295.1 |
| | PERTUSSIS | | | |
| 1624 | BORDETELLA | RGWSIFALY | 2507 | AFK26303.1 |
| | PERTUSSIS | | | |
| 1625 | BORDETELLA | RKMLYLIYV | 2508 | YP_006628018.1 |
| | PERTUSSIS | | | |
| 1626 | BORDETELLA | RLRKMLYLI | 2509 | YP_006628018.1 |
| | PERTUSSIS | | | |
| 1627 | BORDETELLA | RPQITDAVT | 2510 | WP_019249248.1 |
| | PERTUSSIS | | | |
| 1628 | BORDETELLA | RPSVNGGRI | 2511 | WP_019249248.1 |
| | PERTUSSIS | | | |
| 1629 | BORDETELLA | RRFTHADGW | 2512 | AGS56996.1 |
| | PERTUSSIS | | | |
| 1630 | BORDETELLA | RSGARATSL | 2513 | AAA22974.1 |
| | PERTUSSIS | | | |
| 1631 | BORDETELLA | RSRVRALAW | 2514 | NP_882284.1 |
| | PERTUSSIS | | | |
| 1632 | BORDETELLA | RSRVRALSW | 2515 | YP_006628019.1 |
| | PERTUSSIS | | | |
| 1633 | BORDETELLA | RTHGVGASL | 2516 | AGS56996.1 |
| | PERTUSSIS | | | |
| 1634 | BORDETELLA | RTRGQARSG | 2517 | AAA22974.1 |
| | PERTUSSIS | | | |
| 1635 | BORDETELLA | RVAPPAVAL | 2518 | WP_019249248.1 |
| | PERTUSSIS | | | |
| 1636 | BORDETELLA | RVLPEPVKL | 2519 | AGT50936.1 |
| | PERTUSSIS | | | |
| 1637 | BORDETELLA | RVRALAWLL | 2520 | NP_882284.1 |
| | PERTUSSIS | | | |
| 1638 | BORDETELLA | RVRALSWLL | 2521 | YP_006628019.1 |
| | PERTUSSIS | | | |
| 1639 | BORDETELLA | RVTVSGGSL | 2522 | AGT50936.1 |
| | PERTUSSIS | | | |
| 1640 | BORDETELLA | SEAMAAWSE | 2523 | AFK26302.1 |
| | PERTUSSIS | | | |
| 1641 | BORDETELLA | SESHNFHAS | 2524 | WP_019247158.1 |
| | PERTUSSIS | | | |
| 1642 | BORDETELLA | SGEGRVNIG | 2525 | WP_019249248.1 |
| | PERTUSSIS | | | |
| 1643 | BORDETELLA | SGLAVRVHV | 2526 | 1BCP_C |
| | PERTUSSIS | | | |
| 1644 | BORDETELLA | SLADISLGA | 2527 | WP_019249248.1 |
| | PERTUSSIS | | | |
| 1645 | BORDETELLA | SLFAILSST | 2528 | WP_019247158.1 |
| | PERTUSSIS | | | |
| 1646 | BORDETELLA | SLFAPHGNV | 2529 | AAZ74338.1 |
| | PERTUSSIS | | | |
| 1647 | BORDETELLA | SLSIDNATW | 2530 | AGS56996.1 |
| | PERTUSSIS | | | |
| 1648 | BORDETELLA | SPMEVMLRA | 2531 | AAA22983.1 |
| | PERTUSSIS | | | |
| 1649 | BORDETELLA | SPQPIRATV | 2532 | WP_019247158.1 |
| | PERTUSSIS | | | |
| 1650 | BORDETELLA | SPRRARRAL | 2533 | WP_019249248.1 |
| | PERTUSSIS | | | |
| 1651 | BORDETELLA | SPSRLAGTL | 2534 | WP_019249248.1 |
| | PERTUSSIS | | | |
| 1652 | BORDETELLA | SSTPLGSLF | 2535 | WP_019247158.1 |
| | PERTUSSIS | | | |
| 1653 | BORDETELLA | STYELLDYL | 2536 | WP_019249248.1 |
| | PERTUSSIS | | | |
| 1654 | BORDETELLA | SVAMKPYEV | 2537 | AAA22983.1 |
| | PERTUSSIS | | | |
| 1655 | BORDETELLA | SVAPNALAW | 2538 | AAA22974.1 |
| | PERTUSSIS | | | |
| 1656 | BORDETELLA | SVKVAKKLF | 2539 | WP_019249248.1 |
| | PERTUSSIS | | | |
| 1657 | BORDETELLA | TAFMSGRSL | 2540 | AAA22984.1 |
| | PERTUSSIS | | | |
| 1658 | BORDETELLA | TAGATPFDI | 2541 | WP_019248658.1 |
| | PERTUSSIS | | | |
| 1659 | BORDETELLA | TAPVTSPAW | 2542 | AAW72734.1 |
| | PERTUSSIS | | | |
| 1660 | BORDETELLA | TARTGWLTW | 2543 | AAW72734.1 |
| | PERTUSSIS | | | |
| 1661 | BORDETELLA | TEAQGVQVR | 2544 | WP_019248145.1 |
| | PERTUSSIS | | | |
| 1662 | BORDETELLA | TEVYLEHRM | 2545 | AAW72734.1 |
| | PERTUSSIS | | | |
| 1663 | BORDETELLA | TFEGKPALE | 2546 | AAA22983.1 |
| | PERTUSSIS | | | |
| 1664 | BORDETELLA | TFTGKVTNG | 2547 | WP_019248658.1 |
| | PERTUSSIS | | | |
| 1665 | BORDETELLA | TGDGGGHTD | 2548 | AGS56996.1 |
| | PERTUSSIS | | | |
| 1666 | BORDETELLA | TLAKALSAA | 2549 | WP_019249248.1 |
| | PERTUSSIS | | | |
| 1667 | BORDETELLA | TLANVGDTW | 2550 | AGS56996.1 |
| | PERTUSSIS | | | |
| 1668 | BORDETELLA | TLNASNLTL | 2551 | WP_019249248.1 |
| | PERTUSSIS | | | |
| 1669 | BORDETELLA | TLSSAHGNV | 2552 | WP_019249248.1 |
| | PERTUSSIS | | | |
| 1670 | BORDETELLA | TPFDIKLKE | 2553 | WP_019248658.1 |
| | PERTUSSIS | | | |
| 1671 | BORDETELLA | TPFIIKLKD | 2554 | WP_019248145.1 |
| | PERTUSSIS | | | |
| 1672 | BORDETELLA | TPGWSIYGL | 2555 | 1BCP_C |
| | PERTUSSIS | | | |
| 1673 | BORDETELLA | TPLGSAATF | 2556 | AGS56996.1 |
| | PERTUSSIS | | | |
| 1674 | BORDETELLA | TPLGSLFAI | 2557 | WP_019247158.1 |
| | PERTUSSIS | | | |
| 1675 | BORDETELLA | TPLPVSLTA | 2558 | WP_019249248.1 |
| | PERTUSSIS | | | |
| 1676 | BORDETELLA | TRQGIMDQY | 2559 | YP_006626873.1 |
| | PERTUSSIS | | | |
| 1677 | BORDETELLA | TSKQDERNY | 2560 | WP_019247158.1 |
| | PERTUSSIS | | | |
| 1678 | BORDETELLA | TSPYDGKYW | 2561 | YP_006628018.1 |
| | PERTUSSIS | | | |
| 1679 | BORDETELLA | TSRRSVASI | 2562 | AFK26302.1 |
| | PERTUSSIS | | | |
| 1680 | BORDETELLA | TSRTVTMRY | 2563 | NP_879898.1 |
| | PERTUSSIS | | | |
| 1681 | BORDETELLA | TTEYPNARY | 2564 | ADA85123.1 |
| | PERTUSSIS | | | |
| 1682 | BORDETELLA | TTEYSNARY | 2565 | AFK26302.1 |
| | PERTUSSIS | | | |
| 1683 | BORDETELLA | TTLGLEQTF | 2566 | WP_019247158.1 |
| | PERTUSSIS | | | |
| 1684 | BORDETELLA | TVLAAGAGL | 2567 | WP_019249248.1 |
| | PERTUSSIS | | | |
| 1685 | BORDETELLA | TVQELALKL | 2568 | AAA22984.1 |
| | PERTUSSIS | | | |
| 1686 | BORDETELLA | TVVQRNKHW | 2569 | WP_019247158.1 |
| | PERTUSSIS | | | |
| 1687 | BORDETELLA | VAAAADLAL | 2570 | WP_019249248.1 |
| | PERTUSSIS | | | |
| 1688 | BORDETELLA | VALASQARW | 2571 | AGS56996.1 |
| | PERTUSSIS | | | |
| 1689 | BORDETELLA | VAMKPYEVT | 2572 | AAA22983.1 |
| | PERTUSSIS | | | |
| 1690 | BORDETELLA | VARLVKLQG | 2573 | WP_019249248.1 |
| | PERTUSSIS | | | |
| 1691 | BORDETELLA | VAVAGGRWH | 2574 | AGS56996.1 |
| | PERTUSSIS | | | |
| 1692 | BORDETELLA | VEASAITTY | 2575 | WP_019248145.1 |
| | PERTUSSIS | | | |
| 1693 | BORDETELLA | VEDIGGKNY | 2576 | WP_019247158.1 |
| | PERTUSSIS | | | |
| 1694 | BORDETELLA | VEVSSPPPV | 2577 | WP_019247158.1 |
| | PERTUSSIS | | | |
| 1695 | BORDETELLA | VGAGGYEAG | 2578 | WP_019247158.1 |
| | PERTUSSIS | | | |
| 1696 | BORDETELLA | VGGGEHGRW | 2579 | WP_019249248.1 |
| | PERTUSSIS | | | |
| 1697 | BORDETELLA | VHVSKEEQY | 2580 | YP_006628018.1 |
| | PERTUSSIS | | | |
| 1698 | BORDETELLA | VIDGQKVLA | 2581 | AAA22974.1 |
| | PERTUSSIS | | | |
| 1699 | BORDETELLA | VIGACTSPY | 2582 | YP_006628018.1 |
| | PERTUSSIS | | | |
| 1700 | BORDETELLA | VKLGGVYEA | 2583 | AAA22974.1 |
| | PERTUSSIS | | | |
| 1701 | BORDETELLA | VLAPRLYLT | 2584 | AAA22974.1 |
| | PERTUSSIS | | | |
| 1702 | BORDETELLA | VLVKTNMVV | 2585 | AAA22983.1 |
| | PERTUSSIS | | | |
| 1703 | BORDETELLA | VPASGAPAA | 2586 | AGS56996.1 |
| | PERTUSSIS | | | |
| 1704 | BORDETELLA | VPFCFGKDL | 2587 | AAA22983.1 |
| | PERTUSSIS | | | |
| 1705 | BORDETELLA | VPVSEHCTV | 2588 | AAA22974.1 |
| | PERTUSSIS | | | |
| 1706 | BORDETELLA | VPVTPPKVE | 2589 | WP_019247158.1 |
| | PERTUSSIS | | | |
| 1707 | BORDETELLA | VRTVSAMEY | 2590 | WP_019249248.1 |
| | PERTUSSIS | | | |
| 1708 | BORDETELLA | VSGGSLSAP | 2591 | AGT50936.1 |
| | PERTUSSIS | | | |
| 1709 | BORDETELLA | VSSATKAKG | 2592 | WP_019248658.1 |
| | PERTUSSIS | | | |
| 1710 | BORDETELLA | VSSPPPVSV | 2593 | WP_019247158.1 |
| | PERTUSSIS | | | |
| 1711 | BORDETELLA | VSVKVAKKL | 2594 | WP_019249248.1 |
| | PERTUSSIS | | | |
| 1712 | BORDETELLA | VTMRYLASY | 2595 | WP_019248145.1 |
| | PERTUSSIS | | | |
| 1713 | BORDETELLA | VTSVAMKPY | 2596 | AAA22983.1 |
| | PERTUSSIS | | | |
| 1714 | BORDETELLA | VVAEKVTTP | 2597 | WP_019247158.1 |
| | PERTUSSIS | | | |
| 1715 | BORDETELLA | VVDGPPSRP | 2598 | WP_019247158.1 |
| | PERTUSSIS | | | |
| 1716 | BORDETELLA | VVETAQPLP | 2599 | WP_019247158.1 |
| | PERTUSSIS | | | |
| 1717 | BORDETELLA | WLTWLAILA | 2600 | AAW72734.1 |
| | PERTUSSIS | | | |
| 1718 | BORDETELLA | WTFHAGYRY | 2601 | AGS56996.1 |
| | PERTUSSIS | | | |
| 1719 | BORDETELLA | WVMTDNSNV | 2602 | AGS56996.1 |
| | PERTUSSIS | | | |
| 1720 | BORDETELLA | YAEHGEVSI | 2603 | WP_019249248.1 |
| | PERTUSSIS | | | |
| 1721 | BORDETELLA | YAIDGTAAG | 2604 | WP_019249248.1 |
| | PERTUSSIS | | | |
| 1722 | BORDETELLA | YALKSRIAL | 2605 | AAA22984.1 |
| | PERTUSSIS | | | |
| 1723 | BORDETELLA | YATNPQTQL | 2606 | WP_019248145.1 |
| | PERTUSSIS | | | |
| 1724 | BORDETELLA | YDTGDLIAY | 2607 | WP_019248658.1 |
| | PERTUSSIS | | | |
| 1725 | BORDETELLA | YEAGFSLGS | 2608 | WP_019247158.1 |
| | PERTUSSIS | | | |
| 1726 | BORDETELLA | YEDATFETY | 2609 | YP_006628018.1 |
| | PERTUSSIS | | | |
| 1727 | BORDETELLA | YENKSSTPL | 2610 | WP_019247158.1 |
| | PERTUSSIS | | | |
| 1728 | BORDETELLA | YEVTPTRML | 2611 | AAA22983.1 |
| | PERTUSSIS | | | |
| 1729 | BORDETELLA | YEYIWGLYP | 2612 | WP_019249248.1 |
| | PERTUSSIS | | | |
| 1730 | BORDETELLA | YEYIWGLYQ | 2613 | YP_006626470.1 |
| | PERTUSSIS | | | |
| 1731 | BORDETELLA | YEYSKGPKL | 2614 | AGS56996.1 |
| | PERTUSSIS | | | |
| 1732 | BORDETELLA | YFEPGPTTD | 2615 | WP_019248145.1 |
| | PERTUSSIS | | | |
| 1733 | BORDETELLA | YIWGLYPTY | 2616 | WP_019249248.1 |
| | PERTUSSIS | | | |
| 1734 | BORDETELLA | YIWGLYQTY | 2617 | YP_006626470.1 |
| | PERTUSSIS | | | |
| 1735 | BORDETELLA | YLRQITPGW | 2618 | 1BCP_C |
| | PERTUSSIS | | | |
| 1736 | BORDETELLA | YMIYMSGLA | 2619 | 1BCP_C |
| | PERTUSSIS | | | |
| 1737 | BORDETELLA | YPALRAALI | 2620 | WP_019248658.1 |
| | PERTUSSIS | | | |
| 1738 | BORDETELLA | YPGTPGDLL | 2621 | AAA22984.1 |
| | PERTUSSIS | | | |
| 1739 | BORDETELLA | YPTYTEWSV | 2622 | WP_019249248.1 |
| | PERTUSSIS | | | |
| 1740 | BORDETELLA | YQTYTEWSV | 2623 | YP_006626470.1 |
| | PERTUSSIS | | | |
| 1741 | BORDETELLA | YSTGDLRAY | 2624 | WP_019248145.1 |
| | PERTUSSIS | | | |
| 1742 | BORDETELLA | YTLRYLASY | 2625 | WP_019248658.1 |
| | PERTUSSIS | | | |
| 1743 | BORDETELLA | YVLVKTNMV | 2626 | AAA22983.1 |
| | PERTUSSIS | | | |
| 1744 | BORDETELLA | YYDYEDATF | 2627 | YP_006628018.1 |
| | PERTUSSIS | | | |
| 1745 | BORDETELLA | AAFIALYPNSQLAPT | 2628 | Q7VU05 |
| | PERTUSSIS 509 | | | |
| 1746 | BORDETELLA | GGAEYNLALGQRRA | 2629 | Q7VU04 |
| | PERTUSSIS 509 | | | |
| 1747 | BORDETELLA | GGAEYNLALGQRRADA | 2630 | Q7VU04 |
| | PERTUSSIS 509 | | | |
| 1748 | BORDETELLA | IALYPNSQLAPT | 2631 | Q7VU05 |
| | PERTUSSIS 509 | | | |
| 1749 | BORDETELLA | KPDQGEVVAVGPGKKTED | 2632 | P0A339.1 |
| | PERTUSSIS 509 | | | |
| 1750 | BORDETELLA | KPDQGEVVAVGPGKKTEDG | 2633 | P0A339.1 |
| | PERTUSSIS 509 | | | |
| 1751 | BORDETELLA | LAEVLDYHNFVLTQ | 2634 | Q7VWM1.1 |
| | PERTUSSIS 509 | | | |
| 1752 | CORYNEBACTERIUM | QSIALSSLMVAQAIP | 2635 | AAV70486.1 |
| | DIPHTHERIAE | | | |
| 1753 | CORYNEBACTERIUM | SIGVLGYQKTVDHTKVNSKLSLF | 2636 | AAV70486.1 |
| | DIPHTHERIAE | | | |
| 1754 | BORDETELLA | AAHADWNNQSIVKT | 2637 | ABO77783.1 |
| | PERTUSSIS | | | |
| 1755 | BORDETELLA | AALGRG | 2638 | ABO77783.1 |
| | PERTUSSIS | | | |
| 1756 | BORDETELLA | AALGRGHSLYASYE | 2639 | ABO77783.1 |
| | PERTUSSIS | | | |
| 1757 | BORDETELLA | AAPLRRTTLAMALG | 2640 | ABO77783.1 |
| | PERTUSSIS | | | |
| 1758 | BORDETELLA | AAPLSITLQAGAHA | 2641 | ABO77783.1 |
| | PERTUSSIS | | | |
| 1759 | BORDETELLA | ADAQGDIVATELPS | 2642 | ABO77783.1 |
| | PERTUSSIS | | | |
| 1760 | BORDETELLA | ADSGFYLDATLRAS | 2643 | ABO77783.1 |
| | PERTUSSIS | | | |
| 1761 | BORDETELLA | AELA | 2644 | ABO77783.1 |
| | PERTUSSIS | | | |
| 1762 | BORDETELLA | AELAVFRAGGGAYR | 2645 | ABO77783.1 |
| | PERTUSSIS | | | |
| 1763 | BORDETELLA | AELQFRNGSVTSSG | 2646 | ABO77783.1 |
| | PERTUSSIS | | | |
| 1764 | BORDETELLA | AGGRWHLGGLAGYT | 2647 | ABO77783.1 |
| | PERTUSSIS | | | |
| 1765 | BORDETELLA | AGVAAMQGAVVHLQ | 2648 | ABO77783.1 |
| | PERTUSSIS | | | |
| 1766 | BORDETELLA | AGYTRGDRGFTGDG | 2649 | ABO77783.1 |
| | PERTUSSIS | | | |
| 1767 | BORDETELLA | ALASQARWTGATRA | 2650 | ABO77783.1 |
| | PERTUSSIS | | | |
| 1768 | BORDETELLA | AMPWTFHAGYRYSW | 2651 | ABO77783.1 |
| | PERTUSSIS | | | |
| 1769 | BORDETELLA | AMQGAVVHLQRATIRRGDAP | 2652 | ABO77783.1 |
| | PERTUSSIS | | | |
| 1770 | BORDETELLA | ANGLRVRDE | 2653 | ABO77783.1 |
| | PERTUSSIS | | | |
| 1771 | BORDETELLA | ANGLRVRDEGGSSV | 2654 | ABO77783.1 |
| | PERTUSSIS | | | |
| 1772 | BORDETELLA | ANKDGKVDIGTYRY | 2655 | ABO77783.1 |
| | PERTUSSIS | | | |
| 1773 | BORDETELLA | APAAVSVLGASELT | 2656 | ABO77783.1 |
| | PERTUSSIS | | | |
| 1774 | BORDETELLA | APPAPKPAPQPGPQ | 2657 | ABO77783.1 |
| | PERTUSSIS | | | |
| 1775 | BORDETELLA | AQGILLENPAAELQ | 2658 | ABO77783.1 |
| | PERTUSSIS | | | |
| 1776 | BORDETELLA | ARWTGATRAVDSLS | 2659 | ABO77783.1 |
| | PERTUSSIS | | | |
| 1777 | BORDETELLA | ASLEAGRRFTHADG | 2660 | ABO77783.1 |
| | PERTUSSIS | | | |
| 1778 | BORDETELLA | ASYEYSKGPKLAMP | 2661 | ABO77783.1 |
| | PERTUSSIS | | | |
| 1779 | BORDETELLA | ATFTLANKD | 2662 | ABO77783.1 |
| | PERTUSSIS | | | |
| 1780 | BORDETELLA | ATFTLANKDGKVDI | 2663 | ABO77783.1 |
| | PERTUSSIS | | | |
| 1781 | BORDETELLA | ATRAVDSLSIDNAT | 2664 | ABO77783.1 |
| | PERTUSSIS | | | |
| 1782 | BORDETELLA | DDDGIALYVAGEQAQ | 2665 | ABO77783.1 |
| | PERTUSSIS | | | |
| 1783 | BORDETELLA | DDGIALYVAGEQAQ | 2666 | ABO77783.1 |
| | PERTUSSIS | | | |
| 1784 | BORDETELLA | DGGHITGGRAAGVA | 2667 | ABO77783.1 |
| | PERTUSSIS | | | |
| 1785 | BORDETELLA | DGIRRFLGTVTVKAGK | 2668 | ABO77783.1 |
| | PERTUSSIS | | | |
| 1786 | BORDETELLA | DGSVDFQQPAEAGR | 2669 | ABO77783.1 |
| | PERTUSSIS | | | |
| 1787 | BORDETELLA | DGYAVKGKYRTHGV | 2670 | ABO77783.1 |
| | PERTUSSIS | | | |
| 1788 | BORDETELLA | DIVATELPSIPGTS | 2671 | ABO77783.1 |
| | PERTUSSIS | | | |
| 1789 | BORDETELLA | DKLVVMQDASGQHR | 2672 | ABO77783.1 |
| | PERTUSSIS | | | |
| 1790 | BORDETELLA | DLGLSDKLVVMQDA | 2673 | ABO77783.1 |
| | PERTUSSIS | | | |
| 1791 | BORDETELLA | DNATWVMTDNSNVGA | 2674 | ABO77783.1 |
| | PERTUSSIS | | | |
| 1792 | BORDETELLA | DNATWVMTDNSNVGALRLA | 2675 | ABO77783.1 |
| | PERTUSSIS | | | |
| 1793 | BORDETELLA | DNRAGRRFDQKVAG | 2676 | ABO77783.1 |
| | PERTUSSIS | | | |
| 1794 | BORDETELLA | EAGRFKVLTVNTLA | 2677 | ABO77783.1 |
| | PERTUSSIS | | | |
| 1795 | BORDETELLA | ELAQSIVEAPELGA | 2678 | ABO77783.1 |
| | PERTUSSIS | | | |
| 1796 | BORDETELLA | ELGAAIRVGRGARV | 2679 | ABO7783.1 |
| | PERTUSSIS | | | |
| 1797 | BORDETELLA | ELGADHAVAVAGGR | 2680 | ABO77783.1 |
| | PERTUSSIS | | | |
| 1798 | BORDETELLA | ELPSIPGTSIGPLD | 2681 | ABO77783.1 |
| | PERTUSSIS | | | |
| 1799 | BORDETELLA | EPVKLTLTGGADAQ | 2682 | ABO77783.1 |
| | PERTUSSIS | | | |
| 1800 | BORDETELLA | EQAQASIADSTLQG | 2683 | ABO77783.1 |
| | PERTUSSIS | | | |
| 1801 | BORDETELLA | ERGANVTVQRSAIV | 2684 | ABO77783.1 |
| | PERTUSSIS | | | |
| 1802 | BORDETELLA | ERQHGIHIQGSDPG | 2685 | ABO77783.1 |
| | PERTUSSIS | | | |
| 1803 | BORDETELLA | EVGKRIELAGGRQV | 2686 | ABO77783.1 |
| | PERTUSSIS | | | |
| 1804 | BORDETELLA | FDGAGTVHTNGIAH | 2687 | ABO77783.1 |
| | PERTUSSIS | | | |
| 1805 | BORDETELLA | FQQPAEAGRFKVLT | 2688 | ABO77783.1 |
| | PERTUSSIS | | | |
| 1806 | BORDETELLA | FRAGGGAYRAANGL | 2689 | ABO77783.1 |
| | PERTUSSIS | | | |
| 1807 | BORDETELLA | GAHAQGKALLYRVL | 2690 | ABO77783.1 |
| | PERTUSSIS | | | |
| 1808 | BORDETELLA | GARVTVSGGSLSAP | 2691 | ABO77783.1 |
| | PERTUSSIS | | | |
| 1809 | BORDETELLA | GAYRAANGLRVRDE | 2692 | ABO77783.1 |
| | PERTUSSIS | | | |
| 1810 | BORDETELLA | GDAPAGGAVPGGAV | 2693 | ABO77783.1 |
| | PERTUSSIS | | | |
| 1811 | BORDETELLA | GGAVPGGAVPGGFG | 2694 | ABO77783.1 |
| | PERTUSSIS | | | |
| 1812 | BORDETELLA | GGAVPGGFGPVLDG | 2695 | ABO77783.1 |
| | PERTUSSIS | | | |
| 1813 | BORDETELLA | GGFGPVLDGWYGVD | 2696 | ABO77783.1 |
| | PERTUSSIS | | | |
| 1814 | BORDETELLA | GGLHIGALQSLQPE | 2697 | ABO77783.1 |
| | PERTUSSIS | | | |
| 1815 | BORDETELLA | GGVQIERGANVTVQ | 2698 | ABO77783.1 |
| | PERTUSSIS | | | |
| 1816 | BORDETELLA | GHSLYASYEYSKGP | 2699 | ABO77783.1 |
| | PERTUSSIS | | | |
| 1817 | BORDETELLA | GHTDSVHVGGYATY | 2700 | ABO77783.1 |
| | PERTUSSIS | | | |
| 1818 | BORDETELLA | GIAHRTELRGTRAE | 2701 | ABO77783.1 |
| | PERTUSSIS | | | |
| 1819 | BORDETELLA | GKALLYRVLPEPVK | 2702 | ABO77783.1 |
| | PERTUSSIS | | | |
| 1820 | BORDETELLA | GLGMAAALGRGHSL | 2703 | ABO77783.1 |
| | PERTUSSIS | | | |
| 1821 | BORDETELLA | GNVIETGGARRFAP | 2704 | ABO77783.1 |
| | PERTUSSIS | | | |
| 1822 | BORDETELLA | GPLDVALASQARWT | 2705 | ABO77783.1 |
| | PERTUSSIS | | | |
| 1823 | BORDETELLA | GQHRLWVRN | 2706 | ABO77783.1 |
| | PERTUSSIS | | | |
| 1824 | BORDETELLA | GRGFAQRQQLDNRA | 2707 | ABO77783.1 |
| | PERTUSSIS | | | |
| 1825 | BORDETELLA | GRLGLEVGKRIELA | 2708 | ABO77783.1 |
| | PERTUSSIS | | | |
| 1826 | BORDETELLA | GRQVQPYIKASVLQ | 2709 | ABO77783.1 |
| | PERTUSSIS | | | |
| 1827 | BORDETELLA | GRRFTHADGWFLEPQAELA | 2710 | ABO77783.1 |
| | PERTUSSIS | | | |
| 1828 | BORDETELLA | GSEPASANTLLLVQ | 2711 | ABO77783.1 |
| | PERTUSSIS | | | |
| 1829 | BORDETELLA | GSSVLGRLGLEVGK | 2712 | ABO77783.1 |
| | PERTUSSIS | | | |
| 1830 | BORDETELLA | GTTIKVSGRQAQGI | 2713 | ABO77783.1 |
| | PERTUSSIS | | | |
| 1831 | BORDETELLA | GTVTVKAGKLVADH | 2714 | ABO77783.1 |
| | PERTUSSIS | | | |
| 1832 | BORDETELLA | HAVAVAGGRWHLGG | 2715 | ABO77783.1 |
| | PERTUSSIS | | | |
| 1833 | BORDETELLA | IELAGGRQVQPYIK | 2716 | ABO77783.1 |
| | PERTUSSIS | | | |
| 1834 | BORDETELLA | IHIQGSDPGGVRTA | 2717 | ABO77783.1 |
| | PERTUSSIS | | | |
| 1835 | BORDETELLA | IRRFLGTVTVKAGK | 2718 | ABO77783.1 |
| | PERTUSSIS | | | |
| 1836 | BORDETELLA | IRVGRGARVTVSGG | 2719 | ABO77783.1 |
| | PERTUSSIS | | | |
| 1837 | BORDETELLA | ITLQAGAHA | 2720 | ABO77783.1 |
| | PERTUSSIS | | | |
| 1838 | BORDETELLA | ITLQAGAHAQGKAL | 2721 | ABO77783.1 |
| | PERTUSSIS | | | |
| 1839 | BORDETELLA | IVEAPELGAAIRVG | 2722 | ABO77783.1 |
| | PERTUSSIS | | | |
| 1840 | BORDETELLA | IVKTGERQHGIHIQ | 2723 | ABO77783.1 |
| | PERTUSSIS | | | |
| 1841 | BORDETELLA | KAGKLVADHATLAN | 2724 | ABO77783.1 |
| | PERTUSSIS | | | |
| 1842 | BORDETELLA | KGKYRTHGVGASLE | 2725 | ABO77783.1 |
| | PERTUSSIS | | | |
| 1843 | BORDETELLA | KPAPQPGPQPPQPP | 2726 | ABO77783.1 |
| | PERTUSSIS | | | |
| 1844 | BORDETELLA | KVAGFELGADHAVA | 2727 | ABO77783.1 |
| | PERTUSSIS | | | |
| 1845 | BORDETELLA | KVAGSDGYAVKGKY | 2728 | ABO77783.1 |
| | PERTUSSIS | | | |
| 1846 | BORDETELLA | KVDIGTYRYRLAAN | 2729 | ABO77783.1 |
| | PERTUSSIS | | | |
| 1847 | BORDETELLA | KVLTVNTLAGSGLF | 2730 | ABO77783.1 |
| | PERTUSSIS | | | |
| 1848 | BORDETELLA | LAANGNGQWSLVGA | 2731 | ABO77783.1 |
| | PERTUSSIS | | | |
| 1849 | BORDETELLA | LAMPWTFHAGYRYS | 2732 | ABO77783.1 |
| | PERTUSSIS | | | |
| 1850 | BORDETELLA | LASTLWYAESNALS | 2733 | ABO77783.1 |
| | PERTUSSIS | | | |
| 1851 | BORDETELLA | LENDFKVAGSDGYA | 2734 | ABO77783.1 |
| | PERTUSSIS | | | |
| 1852 | BORDETELLA | LENPAAELQFRNGS | 2735 | ABO77783.1 |
| | PERTUSSIS | | | |
| 1853 | BORDETELLA | LGAAPAAHADWNNQ | 2736 | ABO77783.1 |
| | PERTUSSIS | | | |
| 1854 | BORDETELLA | LGGLAGYTRGDRGFTGDG | 2737 | ABO77783.1 |
| | PERTUSSIS | | | |
| 1855 | BORDETELLA | LLENP | 2738 | ABO77783.1 |
| | PERTUSSIS | | | |
| 1856 | BORDETELLA | LLVQTPLGSAATFT | 2739 | ABO77783.1 |
| | PERTUSSIS | | | |
| 1857 | BORDETELLA | LPPSRVVLRDTNVT | 2740 | ABO77783.1 |
| | PERTUSSIS | | | |
| 1858 | BORDETELLA | LQPEDLPPS | 2741 | ABO77783.1 |
| | PERTUSSIS | | | |
| 1859 | BORDETELLA | LQPEDLPPSRVVLR | 2742 | ABO77783.1 |
| | PERTUSSIS | | | |
| 1860 | BORDETELLA | LRASRLENDFKVAG | 2743 | ABO77783.1 |
| | PERTUSSIS | | | |
| 1861 | BORDETELLA | LRLASDGSVDFQQP | 2744 | ABO77783.1 |
| | PERTUSSIS | | | |
| 1862 | BORDETELLA | LSAAANAAVNTGGV | 2745 | ABO77783.1 |
| | PERTUSSIS | | | |
| 1863 | BORDETELLA | LSAPHGNVIETGGA | 2746 | ABO77783.1 |
| | PERTUSSIS | | | |
| 1864 | BORDETELLA | LSDDGIRRFLGTVT | 2747 | ABO77783.1 |
| | PERTUSSIS | | | |
| 1865 | BORDETELLA | LVGAKAPPAPKPAP | 2748 | ABO77783.1 |
| | PERTUSSIS | | | |
| 1866 | BORDETELLA | LYVAGEQAQASIAD | 2749 | ABO77783.1 |
| | PERTUSSIS | | | |
| 1867 | BORDETELLA | MALGALGAAPAAHA | 2750 | ABO77783.1 |
| | PERTUSSIS | | | |
| 1868 | BORDETELLA | MNMSLSRIVKAAPL | 2751 | ABO77783.1 |
| | PERTUSSIS | | | |
| 1869 | BORDETELLA | MQDASGQHR | 2752 | ABO77783.1 |
| | PERTUSSIS | | | |
| 1870 | BORDETELLA | MQGAVVHLQRATIR | 2753 | ABO77783.1 |
| | PERTUSSIS | | | |
| 1871 | BORDETELLA | NAAVNTGGVGLAST | 2754 | ABO77783.1 |
| | PERTUSSIS | | | |
| 1872 | BORDETELLA | NALSKRLGELRLNP | 2755 | ABO77783.1 |
| | PERTUSSIS | | | |
| 1873 | BORDETELLA | NGQWSLVGAKAPPA | 2756 | ABO77783.1 |
| | PERTUSSIS | | | |
| 1874 | BORDETELLA | NTLAGSGLFRMNVF | 2757 | ABO77783.1 |
| | PERTUSSIS | | | |
| 1875 | BORDETELLA | PAGRELSAAANAAV | 2758 | ABO77783.1 |
| | PERTUSSIS | | | |
| 1876 | BORDETELLA | PAPQPPAGRELSAA | 2759 | ABO77783.1 |
| | PERTUSSIS | | | |
| 1877 | BORDETELLA | PGPQPPQPPQPQPE | 2760 | ABO77783.1 |
| | PERTUSSIS | | | |
| 1878 | BORDETELLA | PGTSIGPLDVALAS | 2761 | ABO77783.1 |
| | PERTUSSIS | | | |
| 1879 | BORDETELLA | PLGSAATFTLANKD | 2762 | ABO77783.1 |
| | PERTUSSIS | | | |
| 1880 | BORDETELLA | PQPEAPAPQPPAGR | 2763 | ABO77783.1 |
| | PERTUSSIS | | | |
| 1881 | BORDETELLA | PQPPQPQPEAPAPQ | 2764 | ABO77783.1 |
| | PERTUSSIS | | | |
| 1882 | BORDETELLA | PYIKASVLQEFDGA | 2765 | ABO77783.1 |
| | PERTUSSIS | | | |
| 1883 | BORDETELLA | RFAPQAAPLSITLQ | 2766 | ABO77783.1 |
| | PERTUSSIS | | | |
| 1884 | BORDETELLA | RLGELRLNPDAGGA | 2767 | ABO77783.1 |
| | PERTUSSIS | | | |
| 1885 | BORDETELLA | RLNPDAGGAWGRGF | 2768 | ABO77783.1 |
| | PERTUSSIS | | | |
| 1886 | BORDETELLA | RNGSVTSSGQLSDD | 2769 | ABO77783.1 |
| | PERTUSSIS | | | |
| 1887 | BORDETELLA | RRFDQKVAGFELGA | 2770 | ABO77783.1 |
| | PERTUSSIS | | | |
| 1888 | BORDETELLA | RTTLAMALGALGAA | 2771 | ABO77783.1 |
| | PERTUSSIS | | | |
| 1889 | BORDETELLA | SAIVDGGLHIGALQ | 2772 | ABO77783.1 |
| | PERTUSSIS | | | |
| 1890 | BORDETELLA | SANTLLLVQTPLGS | 2773 | ABO77783.1 |
| | PERTUSSIS | | | |
| 1891 | BORDETELLA | SDPGGVRTASGTTI | 2774 | ABO77783.1 |
| | PERTUSSIS | | | |
| 1892 | BORDETELLA | SELTLDGGHITGGR | 2775 | ABO77783.1 |
| | PERTUSSIS | | | |
| 1893 | BORDETELLA | SGLFRMNVF | 2776 | ABO77783.1 |
| | PERTUSSIS | | | |
| 1894 | BORDETELLA | SGLFRMNVFADLGL | 2777 | ABO77783.1 |
| | PERTUSSIS | | | |
| 1895 | BORDETELLA | SGSSVELAQSIVEA | 2778 | ABO77783.1 |
| | PERTUSSIS | | | |
| 1896 | BORDETELLA | SIADSTLQGAGGVQ | 2779 | ABO77783.1 |
| | PERTUSSIS | | | |
| 1897 | BORDETELLA | SKGPKLAMPWTFHA | 2780 | ABO77783.1 |
| | PERTUSSIS | | | |
| 1898 | BORDETELLA | SNVGALRLASDGSV | 2781 | ABO77783.1 |
| | PERTUSSIS | | | |
| 1899 | BORDETELLA | SRIVKAAPLRRTTL | 2782 | ABO77783.1 |
| | PERTUSSIS | | | |
| 1900 | BORDETELLA | SVLGASELTLDGGH | 2783 | ABO77783.1 |
| | PERTUSSIS | | | |
| 1901 | BORDETELLA | SVLQEFDGA | 2784 | ABO77783.1 |
| | PERTUSSIS | | | |
| 1902 | BORDETELLA | SVLQEFDGAGTVHT | 2785 | ABO77783.1 |
| | PERTUSSIS | | | |
| 1903 | BORDETELLA | TELR | 2786 | ABO77783.1 |
| | PERTUSSIS | | | |
| 1904 | BORDETELLA | TELRGTRAELGLGM | 2787 | ABO77783.1 |
| | PERTUSSIS | | | |
| 1905 | BORDETELLA | TGDGGGHTDSVHVG | 2788 | AB077783.1 |
| | PERTUSSIS | | | |
| 1906 | BORDETELLA | TGGARRFAPQAAPL | 2789 | ABO77783.1 |
| | PERTUSSIS | | | |
| 1907 | BORDETELLA | TGGRAAGVAAMQGA | 2790 | ABO77783.1 |
| | PERTUSSIS | | | |
| 1908 | BORDETELLA | TGGVGLASTLWYAE | 2791 | ABO77783.1 |
| | PERTUSSIS | | | |
| 1909 | BORDETELLA | THGVGASLEAGRRF | 2792 | ABO77783.1 |
| | PERTUSSIS | | | |
| 1910 | BORDETELLA | TIRRGDAPA | 2793 | ABO77783.1 |
| | PERTUSSIS | | | |
| 1911 | BORDETELLA | TLANVGDTWDDDGI | 2794 | ABO77783.1 |
| | PERTUSSIS | | | |
| 1912 | BORDETELLA | TLQGAGGVQIERGA | 2795 | ABO77783.1 |
| | PERTUSSIS | | | |
| 1913 | BORDETELLA | TLTGGADAQGDIVA | 2796 | ABO77783.1 |
| | PERTUSSIS | | | |
| 1914 | BORDETELLA | TNVTAVPASGAPAA | 2797 | ABO77783.1 |
| | PERTUSSIS | | | |
| 1915 | BORDETELLA | TRAELGLGMAAALG | 2798 | ABO77783.1 |
| | PERTUSSIS | | | |
| 1916 | BORDETELLA | TSSGQLSDDGIRRF | 2799 | ABO77783.1 |
| | PERTUSSIS | | | |
| 1917 | BORDETELLA | TVHTNGIAHRTELR | 2800 | ABO77783.1 |
| | PERTUSSIS | | | |
| 1918 | BORDETELLA | TYRYRLAANGNGQW | 2801 | ABO77783.1 |
| | PERTUSSIS | | | |
| 1919 | BORDETELLA | VADHATLANVGDTW | 2802 | ABO77783.1 |
| | PERTUSSIS | | | |
| 1920 | BORDETELLA | VHVGGYATYIADSG | 2803 | ABO77783.1 |
| | PERTUSSIS | | | |
| 1921 | BORDETELLA | VLDGWYGVD | 2804 | ABO77783.1 |
| | PERTUSSIS | | | |
| 1922 | BORDETELLA | VPASGAPAAVSVLG | 2805 | ABO77783.1 |
| | PERTUSSIS | | | |
| 1923 | BORDETELLA | VRDEGGSSVLGRLG | 2806 | AB077783.1 |
| | PERTUSSIS | | | |
| 1924 | BORDETELLA | VRTASGTTIKVSGR | 2807 | ABO77783.1 |
| | PERTUSSIS | | | |
| 1925 | BORDETELLA | VSGGSLSAPHGNVI | 2808 | ABO77783.1 |
| | PERTUSSIS | | | |
| 1926 | BORDETELLA | VSGRQAQGILLENP | 2809 | ABO77783.1 |
| | PERTUSSIS | | | |
| 1927 | BORDETELLA | VTVQRSAIVDGGLH | 2810 | ABO77783.1 |
| | PERTUSSIS | | | |
| 1928 | BORDETELLA | VVLRDTNVTAVPAS | 2811 | ABO77783.1 |
| | PERTUSSIS | | | |
| 1929 | BORDETELLA | WNNQSIVKTGERQH | 2812 | ABO77783.1 |
| | PERTUSSIS | | | |
| 1930 | BORDETELLA | WVRNSGSEPASANT | 2813 | ABO77783.1 |
| | PERTUSSIS | | | |
| 1931 | BORDETELLA | WYAESNALSKRLGE | 2814 | ABO77783.1 |
| | PERTUSSIS | | | |
| 1932 | BORDETELLA | YATYIADSGFYLDA | 2815 | ABO77783.1 |
| | PERTUSSIS | | | |
| 1933 | BORDETELLA | YGVDVSGSS | 2816 | ABO77783.1 |
| | PERTUSSIS | | | |
| 1934 | BORDETELLA | YGVDVSGSSVELAQ | 2817 | ABO77783.1 |
| | PERTUSSIS | | | |
| 1935 | BORDETELLA | YLDATLRASRLEND | 2818 | ABO77783.1 |
| | PERTUSSIS | | | |
| 1936 | BORDETELLA | YRVLPEPVKLTLTG | 2819 | ABO77783.1 |
| | PERTUSSIS | | | |
| 1937 | BORDETELLA | VKAQNITNKRAALIEA | 2820 | AAA22974.1 |
| | PERTUSSIS | | | |
| 1938 | BORDETELLA | YYSNVTATRLLSSTNS | 2821 | AAA83981.1 |
| | PERTUSSIS | | | |
| 1939 | BORDETELLA | SPNLTDERAAQAGVT | 2822 | CPP72976.1 |
| | PERTUSSIS | | | |
| 1940 | MEASLES | SSRASDERAAHLPTS | 2823 | BAA33867.1 |
| | MORBILLIVIRUS | | | |
| 1941 | CORYNEBACTERIUM | QVVHNSYNRPAYSPG | 2824 | 1007216A |
| | DIPHTHERIAE | | | |
| 1942 | MEASLES VIRUS | AEGGEIHEL | 2825 | AAF85692.1 |
| | STRAIN | | | |
| | EDMONSTON-B | | | |
| 1943 | MEASLES VIRUS | AENLISNGIGKY | 2826 | AAF85698.1 |
| | STRAIN | | | |
| | EDMONSTON-B | | | |
| 1944 | MEASLES VIRUS | AEVDGDVKL | 2827 | CAB43772.1 |
| | STRAIN | | | |
| | EDMONSTON-B | | | |
| 1945 | MEASLES VIRUS | AIYTAEIHK | 2828 | AAF85697.1 |
| | STRAIN | | | |
| | EDMONSTON-B | | | |
| 1946 | MEASLES VIRUS | APVFHMTNY | 2829 | CAB43772.1 |
| | STRAIN | | | |
| | EDMONSTON-B | | | |
| 1947 | MEASLES VIRUS | APVFHMTNYLEQPVSN | 2830 | AAR89413.1 |
| | STRAIN | | | |
| | EDMONSTON-B | | | |
| 1948 | MEASLES VIRUS | AQRLNEIY | 2831 | AAF85698.1 |
| | STRAIN | | | |
| | EDMONSTON-B | | | |
| 1949 | MEASLES VIRUS | ARVPHAYSL | 2832 | AAF85698.1 |
| | STRAIN | | | |
| | EDMONSTON-B | | | |
| 1950 | MEASLES VIRUS | AVRDLERAM | 2833 | P03424.1 |
| | STRAIN | | | |
| | EDMONSTON-B | | | |
| 1951 | MEASLES VIRUS | AVRDLERAMTTLK | 2834 | P03424.1 |
| | STRAIN | | | |
| | EDMONSTON-B | | | |
| 1952 | MEASLES VIRUS | DALLRLQAM | 2835 | Q89933.1 |
| | STRAIN | | | |
| | EDMONSTON-B | | | |
| 1935 | MEASLES VIRUS | DIKEKVINL | 2836 | AAF85698.1 |
| | STRAIN | | | |
| | EDMONSTON-B | | | |
| 1954 | MEASLES VIRUS | DQGLFKVL | 2837 | AAF85695.1 |
| | STRAIN | | | |
| | EDMONSTON-B | | | |
| 1955 | MEASLES VIRUS | DTGVDTRIW | 2838 | Q9EMA9.1 |
| | STRAIN | | | |
| | EDMONSTON-B | | | |
| 1956 | MEASLES VIRUS | EPIGSLAIEEAM | 2839 | AAF85692.1 |
| | STRAIN | | | |
| | EDMONSTON-B | | | |
| 1957 | MEASLES VIRUS | EPIRDALNAM | 2840 | P69354.1 |
| | STRAIN | | | |
| | EDMONSTON-B | | | |
| 1958 | MEASLES VIRUS | FPKLGKTL | 2841 | AAF85692.1 |
| | STRAIN | | | |
| | EDMONSTON-B | | | |
| 1959 | MEASLES VIRUS | FRSVNAVAF | 2842 | AAF85695.1 |
| | STRAIN | | | |
| | EDMONSTON-B | | | |
| 1960 | MEASLES VIRUS | GKIIDNTEQL | 2843 | AAF85695.1 |
| | STRAIN | | | |
| | EDMONSTON-B | | | |
| 1961 | MEASLES VIRUS | GLNEKLVFY | 2844 | AAF85695.1 |
| | STRAIN | | | |
| | EDMONSTON-B | | | |
| 1962 | MEASLES VIRUS | GMYGGTYLVEK | 2845 | AAC35876.2 |
| | STRAIN | | | |
| | EDMONSTON-B | | | |
| 1963 | MEASLES VIRUS | GPPISLERLDVGTN | 2846 | P69354.1 |
| | STRAIN | | | |
| | EDMONSTON-B | | | |
| 1964 | MEASLES VIRUS | GPRQAQVSFL | 2847 | Q89933.1 |
| | STRAIN | | | |
| | EDMONSTON-B | | | |
| 1965 | MEASLES VIRUS | GRLVPQVRVID | 2848 | AAF85695.1 |
| | STRAIN | | | |
| | EDMONSTON-B | | | |
| 1966 | MEASLES VIRUS | GSAPISMGFR | 2849 | AAF85692.1 |
| | STRAIN | | | |
| | EDMONSTON-B | | | |
| 1967 | MEASLES VIRUS | HILAKSTAL | 2850 | AAF85698.1 |
| | STRAIN | | | |
| | EDMONSTON-B | | | |
| 1968 | MEASLES VIRUS | HYREVNLVY | 2851 | AAF85698.1 |
| | STRAIN | | | |
| | EDMONSTON-B | | | |
| 1969 | MEASLES VIRUS | IPPMKNLAL | 2852 | AAC35876.2 |
| | STRAIN | | | |
| | EDMONSTON-B | | | |
| 1970 | MEASLES VIRUS | IPYQGSGKGVSF | 2853 | CAB43772.1 |
| | STRAIN | | | |
| | EDMONSTON-B | | | |
| 1971 | MEASLES VIRUS | ISKESQHVY | 2854 | AAF85698.1 |
| | STRAIN | | | |
| | EDMONSTON-B | | | |
| 1972 | MEASLES VIRUS | IVSSHFFVY | 2855 | AAF85698.1 |
| | STRAIN | | | |
| | EDMONSTON-B | | | |
| 1973 | MEASLES VIRUS | KEIKETGRLF | 2856 | AAF85698.1 |
| | STRAIN | | | |
| | EDMONSTON-B | | | |
| 1974 | MEASLES VIRUS | KESQHVYYL | 2857 | AAF85698.1 |
| | STRAIN | | | |
| | EDMONSTON-B | | | |
| 1975 | MEASLES VIRUS | KIIDNTEQL | 2858 | AAF85695.1 |
| | STRAIN | | | |
| | EDMONSTON-B | | | |
| 1976 | MEASLES VIRUS | KKQINRQN | 2859 | AAA63285.1 |
| | STRAIN | | | |
| | EDMONSTON-B | | | |
| 1977 | MEASLES VIRUS | KKVDTNFIYQ | 2860 | AAF85698.1 |
| | STRAIN | | | |
| | EDMONSTON-B | | | |
| 1978 | MEASLES VIRUS | KLIDGFFPA | 2861 | AAF85698.1 |
| | STRAIN | | | |
| | EDMONSTON-B | | | |
| 1979 | MEASLES VIRUS | KPNLSSKRSEL | 2862 | BAB39848.1 |
| | STRAIN | | | |
| | EDMONSTON-B | | | |
| 1980 | MEASLES VIRUS | KVSPYLFTV | 2863 | AAR89413.1 |
| | STRAIN | | | |
| | EDMONSTON-B | | | |
| 1981 | MEASLES VIRUS | LETRTTNQFL | 2864 | CAB43772.1 |
| | STRAIN | | | |
| | EDMONSTON-B | | | |
| 1982 | MEASLES VIRUS | LLKEATEL | 2865 | AAF85695.1 |
| | STRAIN | | | |
| | EDMONSTON-B | | | |
| 1983 | MEASLES VIRUS | LLKKGNSLY | 2866 | AAF85698.1 |
| | STRAIN | | | |
| | EDMONSTON-B | | | |
| 1984 | MEASLES VIRUS | LPAPIGGMNY | 2867 | AAF85698.1 |
| | STRAIN | | | |
| | EDMONSTON-B | | | |
| 1985 | MEASLES VIRUS | MPEETLHQVM | 2868 | AAF85698.1 |
| | STRAIN | | | |
| | EDMONSTON-B | | | |
| 1986 | MEASLES VIRUS | PTTIRGQFS | 2869 | CAB43772.1 |
| | STRAIN | | | |
| | EDMONSTON-B | | | |
| 1987 | MEASLES VIRUS | QEISRHQALGY | 2870 | P03424.1 |
| | STRAIN | | | |
| | EDMONSTON-B | | | |
| 1988 | MEASLES VIRUS | RITHVDTESY | 2871 | P69354.1 |
| | STRAIN | | | |
| | EDMONSTON-B | | | |
| 1989 | MEASLES VIRUS | RPGLKPDL | 2872 | P69354.1 |
| | STRAIN | | | |
| | EDMONSTON-B | | | |
| 1990 | MEASLES VIRUS | RPIYGLEV | 2873 | AAF85698.1 |
| | STRAIN | | | |
| | EDMONSTON-B | | | |
| 1991 | MEASLES VIRUS | RQAGQEMILAV | 2874 | P69354.1 |
| | STRAIN | | | |
| | EDMONSTON-B | | | |
| 1992 | MEASLES VIRUS | SAVRIATVY | 2875 | AAF85698.1 |
| | STRAIN | | | |
| | EDMONSTON-B | | | |
| 1993 | MEASLES VIRUS | SLMPEETLHQV | 2876 | AAF85698.1 |
| | STRAIN | | | |
| | EDMONSTON-B | | | |
| 1994 | MEASLES VIRUS | SMIDLVTKF | 2877 | AAF85698.1 |
| | STRAIN | | | |
| | EDMONSTON-B | | | |
| 1995 | MEASLES VIRUS | SMLNSQAIDNLRA | 2878 | P69354.1 |
| | STRAIN | | | |
| | EDMONSTON-B | | | |
| 1996 | MEASLES VIRUS | SMYRVFEV | 2879 | CAB43772.1 |
| | STRAIN | | | |
| | EDMONSTON-B | | | |
| 1997 | MEASLES VIRUS | SQQGMFHAY | 2880 | AAF85698.1 |
| | STRAIN | | | |
| | EDMONSTON-B | | | |
| 1998 | MEASLES VIRUS | TDTPIVYNDRNLLD | 2881 | Q89933.1 |
| | STRAIN | | | |
| | EDMONSTON-B | | | |
| 1999 | MEASLES VIRUS | VIINDDQGLFKV | 2882 | AAF85695.1 |
| | STRAIN | | | |
| | EDMONSTON-B | | | |
| 2000 | MEASLES VIRUS | YESGVRIASL | 2883 | AAF85698.1 |
| | STRAIN | | | |
| | EDMONSTON-B | | | |
| 2001 | MEASLES VIRUS | YLKDKALA | 2884 | AAF85698.1 |
| | STRAIN | | | |
| | EDMONSTON-B | | | |
| 2002 | MEASLES VIRUS | YVYDHSGEAVK | 2885 | AAF85692.1 |
| | STRAIN | | | |
| | EDMONSTON-B | | | |
| 2003 | RUBELLA VIRUS | ARVIDPAAQSFTGVV | 2886 | BAA28178.1 |
| 2004 | RUBELLA VIRUS | SDRASARVIDPAAQS | 2887 | BAA28178.1 |
| 2005 | RUBELLA VIRUS | VPPGKFVTAALLNTP | 2888 | BAA28178.1 |
| 2006 | RUBELLA VIRUS | WVTPVIGSQARKCGL | 2889 | BAA28178.1 |
| 2007 | MUMPS | GTYRLIPNARANLTA | 400 | AGC97176.1 |
| | RUBULAVIRUS | | | |

[0841] I. Delivery of Prime Editors

[0842] In another aspect, the present disclosure provides for the delivery of prime editors in vitro and in vivo using various strategies, including on separate vectors using split inteins and as well as direct delivery strategies of the ribonucleoprotein complex (i.e., the prime editor complexed to the PEgRNA and/or the second-site gRNA) using techniques such as electroporation, use of cationic lipid-mediated formulations, and induced endocytosis methods using receptor ligands fused to to the ribonucleotprotein complexes. Any such methods are contemplated herein.

### Overview of Delivery Options

[0843] In some aspects, the invention provides methods comprising delivering one or more prime editor-encoding polynucleotides, such as or one or more vectors as described herein encoding one or more components of the prime editing system described herein, one or more transcripts thereof, and/or one or proteins transcribed therefrom, to a host cell. In some aspects, the invention further provides cells produced by such methods, and organisms (such as animals, plants, or fungi) comprising or produced from such cells. In some embodiments, a prime editor as described herein in combination with (and optionally complexed with) a guide sequence is delivered to a cell. Conventional viral and non-viral based gene transfer methods can be used to introduce nucleic acids in mammalian cells or target tissues. Such methods can be used to administer nucleic acids encoding components of a prime editor to cells in culture, or in a host organism. Non-viral vector delivery systems include DNA plasmids, RNA (e.g. a transcript of a vector described herein), naked nucleic acid, and nucleic acid complexed with a delivery vehicle, such as a liposome. Viral vector delivery systems include DNA and RNA viruses, which have either episomal or integrated genomes after delivery to the cell. For a review of gene therapy procedures, see Anderson, Science 256:808-813 (1992); Nabel & Felgner, TIBTECH 11:211-217 (1993); Mitani & Caskey, TIBTECH 11:162-166 (1993); Dillon, TIBTECH 11:167-175 (1993); Miller, Nature 357:455-460 (1992); Van Brunt, Biotechnology 6(10):1149-1154 (1988); Vigne, Restorative Neurology and Neuroscience 8:35-36 (1995); Kremer & Perricaudet, British Medical Bulletin 51(1):31-44 (1995); Haddada et al., in Current Topics in Microbiology and Immunology Doerfler and Bihm (eds) (1995); and Yu et al., Gene Therapy 1:13-26 (1994).

[0844] Methods of non-viral delivery of nucleic acids include lipofection, nucleofection, microinjection, biolistics, virosomes, liposomes, immunoliposomes, polycation or lipid:nucleic acid conjugates, naked DNA, artificial virions, and agent-enhanced uptake of DNA. Lipofection is described in e.g., U.S. Pat. Nos. 5,049,386, 4,946,787; and 4,897,355) and lipofection reagents are sold commercially (e.g., Transfectam™ and Lipofectin™) Cationic and neutral lipids that are suitable for efficient receptor-recognition lipofection of polynucleotides include those of Feigner, WO 91/17424; WO 91/16024. Delivery can be to cells (e.g. in vitro or ex vivo administration) or target tissues (e.g. in vivo administration).

[0845] The preparation of lipid:nucleic acid complexes, including targeted liposomes such as immunolipid complexes, is well known to one of skill in the art (see, e.g., Crystal, Science 270:404-410 (1995); Blaese et al., Cancer Gene Ther. 2:291-297 (1995); Behr et al., Bioconjugate Chem. 5:382-389 (1994); Remy et al., Bioconjugate Chem. 5:647-654 (1994); Gao et al., Gene Therapy 2:710-722 (1995); Ahmad et al., Cancer Res. 52:4817-4820 (1992); U.S. Pat. Nos. 4,186,183, 4,217,344, 4,235,871, 4,261,975, 4,485,054, 4,501,728, 4,774,085, 4,837,028, and 4,946,787).

[0846] The use of RNA or DNA viral based systems for the delivery of nucleic acids take advantage of highly evolved processes for targeting a virus to specific cells in the body and trafficking the viral payload to the nucleus. Viral vectors can be administered directly to patients (in vivo) or they can be used to treat cells in vitro, and the modified cells may optionally be administered to patients (ex vivo). Conventional viral based systems could include retroviral, lentivirus, adenoviral, adeno-associated and herpes simplex virus vectors for gene transfer. Integration in the host genome is possible with the retrovirus, lentivirus, and adeno-associated virus gene transfer methods, often resulting in long term expression of the inserted transgene. Additionally, high transduction efficiencies have been observed in many different cell types and target tissues.

[0847] The tropism of a viruses can be altered by incorporating foreign envelope proteins, expanding the potential target population of target cells. Lentiviral vectors are retroviral vectors that are able to transduce or infect non-dividing cells and typically produce high viral titers. Selection of a retroviral gene transfer system would therefore depend on the target tissue. Retroviral vectors are comprised of cis-acting long terminal repeats with packaging capacity for up to 6-10 kb of foreign sequence. The minimum cis-acting LTRs are sufficient for replication and packaging of the vectors, which are then used to integrate the therapeutic gene into the target cell to provide permanent transgene expression. Widely used retroviral vectors include those based upon murine leukemia virus (MuLV), gibbon ape leukemia virus (GaLV), Simian Immuno deficiency virus (SIV), human immuno deficiency virus (HIV), and combinations thereof (see, e.g., Buchscher et al., J. Virol. 66:2731-2739 (1992); Johann et al., J. Virol. 66:1635-1640 (1992); Sommnerfelt et al., Virol. 176:58-59 (1990); Wilson et al., J. Virol. 63:2374-2378 (1989); Miller et al., J. Virol. 65:2220-2224 (1991); PCT/US94/05700). In applications where transient expression is preferred, adenoviral based systems may be used. Adenoviral based vectors are capable of very high transduction efficiency in many cell types and do not require cell division. With such vectors, high titer and levels of expression have been obtained. This vector can be produced in large quantities in a relatively simple system. Adeno-associated virus (“AAV”) vectors may also be used to transduce cells with target nucleic acids, e.g., in the in vitro production of nucleic acids and peptides, and for in vivo and ex vivo gene therapy procedures (see, e.g., West et al., Virology 160:38-47 (1987); U.S. Pat. No. 4,797,368; WO 93/24641; Kotin, Human Gene Therapy 5:793-801 (1994); Muzyczka, J. Clin. Invest. 94:1351 (1994). Construction of recombinant AAV vectors are described in a number of publications, including U.S. Pat. No. 5,173,414; Tratschin et al., Mol. Cell. Biol. 5:3251-3260 (1985); Tratschin, et al., Mol. Cell. Biol. 4:2072-2081 (1984); Hermonat & Muzyczka, PNAS 81:6466-6470 (1984); and Samulski et al., J. Virol. 63:03822-3828 (1989).

[0848] Packaging cells are typically used to form virus particles that are capable of infecting a host cell. Such cells include 293 cells, which package adenovirus, and ψ2 cells or PA317 cells, which package retrovirus. Viral vectors used in gene therapy are usually generated by producing a cell line that packages a nucleic acid vector into a viral particle. The vectors typically contain the minimal viral sequences required for packaging and subsequent integration into a host, other viral sequences being replaced by an expression cassette for the polynucleotide(s) to be expressed. The missing viral functions are typically supplied in trans by the packaging cell line. For example, AAV vectors used in gene therapy typically only possess ITR sequences from the AAV genome which are required for packaging and integration into the host genome. Viral DNA is packaged in a cell line, which contains a helper plasmid encoding the other AAV genes, namely rep and cap, but lacking ITR sequences. The cell line may also be infected with adenovirus as a helper. The helper virus promotes replication of the AAV vector and expression of AAV genes from the helper plasmid. The helper plasmid is not packaged in significant amounts due to a lack of ITR sequences. Contamination with adenovirus can be reduced by, e.g., heat treatment to which adenovirus is more sensitive than AAV. Additional methods for the delivery of nucleic acids to cells are known to those skilled in the art. See, for example, US20030087817, incorporated herein by reference.

[0849] In various embodiments, the PE constructs (including, the split-constructs) may be engineered for delivery in one or more rAAV vectors. An rAAV as related to any of the methods and compositions provided herein may be of any serotype including any derivative or pseudotype (e.g., 1, 2, 3, 4, 5, 6, 7, 8, 9, 10, 11, 12, 13, 2/1, 2/5, 2/8, 2/9, 3/1, 3/5, 3/8, or 3/9). An rAAV may comprise a genetic load (i.e., a recombinant nucleic acid vector that expresses a gene of interest, such as a whole or split PE fusion protein that is carried by the rAAV into a cell) that is to be delivered to a cell. An rAAV may be chimeric.

[0850] As used herein, the serotype of an rAAV refers to the serotype of the capsid proteins of the recombinant virus. Non-limiting examples of derivatives and pseudotypes include rAAV2/1, rAAV2/5, rAAV2/8, rAAV2/9, AAV2-AAV3 hybrid, AAVrh.10, AAVhu.14, AAV3a/3b, AAVrh32.33, AAV-HSC15, AAV-HSC17, AAVhu.37, AAVrh.8, CHt-P6, AAV2.5, AAV6.2, AAV2i8, AAV-HSC15/17, AAVM41, AAV9.45, AAV6(Y445F/Y731F), AAV2.5T, AAV-HAE1/2, AAV clone 32/83, AAVShH10, AAV2 (Y->F), AAV8 (Y733F), AAV2.15, AAV2.4, AAVM41, and AAVr3.45. A non-limiting example of derivatives and pseudotypes that have chimeric VP1 proteins is rAAV2/5-1VP1u, which has the genome of AAV2, capsid backbone of AAV5 and VP1u of AAV1. Other non-limiting example of derivatives and pseudotypes that have chimeric VP1 proteins are rAAV2/5-8VP1u, rAAV2/9-1VP1u, and rAAV2/9-8VP1u.

[0851] AAV derivatives/pseudotypes, and methods of producing such derivatives/pseudotypes are known in the art (see, e.g., Mol Ther. 2012 April; 20(4):699-708. doi: 10.1038/mt.2011.287. Epub 2012 Jan. 24. The AAV vector toolkit: poised at the clinical crossroads. Asokan A1, Schaffer D V, Samulski R J.). Methods for producing and using pseudotyped rAAV vectors are known in the art (see, e.g., Duan et al., J. Virol., 75:7662-7671, 2001; Halbert et al., J. Virol., 74:1524-1532, 2000; Zolotukhin et al., Methods, 28:158-167, 2002; and Auricchio et al., Hum. Molec. Genet., 10:3075-3081, 2001).

[0852] Methods of making or packaging rAAV particles are known in the art and reagents are commercially available (see, e.g., Zolotukhin et al. Production and purification of serotype 1, 2, and 5 recombinant adeno-associated viral vectors. Methods 28 (2002) 158-167; and U.S. Patent Publication Numbers US20070015238 and US20120322861, which are incorporated herein by reference; and plasmids and kits available from ATCC and Cell Biolabs, Inc.). For example, a plasmid comprising a gene of interest may be combined with one or more helper plasmids, e.g., that contain a rep gene (e.g., encoding Rep78, Rep68, Rep52 and Rep40) and a cap gene (encoding VP1, VP2, and VP3, including a modified VP2 region as described herein), and transfected into a recombinant cells such that the rAAV particle can be packaged and subsequently purified.

[0853] Recombinant AAV may comprise a nucleic acid vector, which may comprise at a minimum: (a) one or more heterologous nucleic acid regions comprising a sequence encoding a protein or polypeptide of interest or an RNA of interest (e.g., a siRNA or microRNA), and (b) one or more regions comprising inverted terminal repeat (ITR) sequences (e.g., wild-type ITR sequences or engineered ITR sequences) flanking the one or more nucleic acid regions (e.g., heterologous nucleic acid regions). Herein, heterologous nucleic acid regions comprising a sequence encoding a protein of interest or RNA of interest are referred to as genes of interest.

[0854] Any one of the rAAV particles provided herein may have capsid proteins that have amino acids of different serotypes outside of the VPlu region. In some embodiments, the serotype of the backbone of the VP1 protein is different from the serotype of the ITRs and/or the Rep gene. In some embodiments, the serotype of the backbone of the VP1 capsid protein of a particle is the same as the serotype of the ITRs. In some embodiments, the serotype of the backbone of the VP1 capsid protein of a particle is the same as the serotype of the Rep gene. In some embodiments, capsid proteins of rAAV particles comprise amino acid mutations that result in improved transduction efficiency.

[0855] In some embodiments, the nucleic acid vector comprises one or more regions comprising a sequence that facilitates expression of the nucleic acid (e.g., the heterologous nucleic acid), e.g., expression control sequences operatively linked to the nucleic acid. Numerous such sequences are known in the art. Non-limiting examples of expression control sequences include promoters, insulators, silencers, response elements, introns, enhancers, initiation sites, termination signals, and poly(A) tails. Any combination of such control sequences is contemplated herein (e.g., a promoter and an enhancer).

[0856] Final AAV constructs may incorporate a sequence encoding the PEgRNA. In other embodiments, the AAV constructs may incorporate a sequence encoding the second-site nicking guide RNA. In still other embodiments, the AAV constructs may incorporate a sequence encoding the second-site nicking guide RNA and a sequence encoding the PEgRNA.

[0857] In various embodiments, the PEgRNAs and the second-site nicking guide RNAs can be expressed from an appropriate promoter, such as a human U6 (hU6) promoter, a mouse U6 (mU6) promoter, or other appropriate promoter. The PEgRNAs and the second-site nicking guide RNAs can be driven by the same promoters or different promoters.

[0858] In some embodiments, a rAAV constructs or the herein compositions are administered to a subject enterally. In some embodiments, a rAAV constructs or the herein compositions are administered to the subject parenterally. In some embodiments, a rAAV particle or the herein compositions are administered to a subject subcutaneously, intraocularly, intravitreally, subretinally, intravenously (IV), intracerebro-ventricularly, intramuscularly, intrathecally (IT), intracisternally, intraperitoneally, via inhalation, topically, or by direct injection to one or more cells, tissues, or organs. In some embodiments, a rAAV particle or the herein compositions are administered to the subject by injection into the hepatic artery or portal vein.

### Split PE Vector-Based Strategies

[0859] In this aspect, the prime editors can be divided at a split site and provided as two halves of a whole/complete prime editor. The two halves can be delivered to cells (e.g., as expressed proteins or on separate expression vectors) and once in contact inside the cell, the two halves form the complete prime editor through the self-splicing action of the inteins on each prime editor half. Split intein sequences can be engineered into each of the halves of the encoded prime editor to facilitate their transplicing inside the cell and the concomitant restoration of the complete, functioning PE.

[0860] These split intein-based methods overcome several barriers to in vivo delivery. For example, the DNA encoding prime editors is larger than the rAAV packaging limit, and so requires special solutions. One such solution is formulating the editor fused to split intein pairs that are packaged into two separate rAAV particles that, when co-delivered to a cell, reconstitute the functional editor protein. Several other special considerations to account for the unique features of prime editing are described, including the optimization of second-site nicking targets and properly packaging prime editors into virus vectors, including lentiviruses and rAAV.

[0861] In this aspect, the prime editors can be divided at a split site and provided as two halves of a whole/complete prime editor. The two halves can be delivered to cells (e.g., as expressed proteins or on separate expression vectors) and once in contact inside the cell, the two halves form the complete prime editor through the self-splicing action of the inteins on each prime editor half. Split intein sequences can be engineered into each of the halves of the encoded prime editor to facilitate their transplicing inside the cell and the concomitant restoration of the complete, functioning PE.

[0862] FIG. 66 depicts depicts one embodiment of a prime editor being provided as two PE half proteins which regenerate as whole prime editor through the self-splicing action of the split-intein halves located at the end or beginning of each of the prime editor half proteins. As used herein, the term “PE N-terminal half” refers to the N-terminal half of a complete prime editor and which comprises the “N intein” at the C-terminal end of the PE N-terminal half (i.e., the N-terminal extein) of the complete prime editor. The “N intein” refers to the N-terminal half of a complete, fully-formed split-intein moiety. As used herein, the term “PE C-terminal half” refers to the C-terminal half of a complete prime editor and which comprises the “C intein” at the N-terminal end of the C-terminal half (i.e., the C-terminal extein) of a complete prime editor. When the two half proteins, i.e., the PE N-terminal half and the PE C-terminal half, come into contact with one another, e.g., within the cell, the N intein and the C intein undergo the simultanous process of self-excision and the formation of a peptide bond between the C-terminal end of the PE N-terminal half and the N-terminal end of the PE C-terminal half to reform the complete prime editor protein comprising the complete napDNAbp domain (e.g., Cas9 nickase) and the RT domain. Although not shown in the drawing, the prime editor may also comprise additional sequences including NLS at the N-terminus and/or C-terminus, as well as amino acid linkers sequences joining each domain.

[0863] In various embodiments, the prime editors may be engineered as two half proteins (i.e., a PE N-terminal half and a PE C-terminal half) by “splitting” the whole prime editor as a “split site.” The “split site” refers to the location of insertion of split intein sequences (i.e., the N intein and the C intein) between two adjacent amino acid residues in the prime editor. More specifically, the “split site” refers to the location of dividing the whole prime editor into two separate halves, wherein in each halve is fused at the split site to either the N intein or the C intein motifs. The split site can be at any suitable location in the prime editor fusion protein, but preferably the split site is located at a position that allows for the formation of two half proteins which are appropriately sized for delivery (e.g., by expression vector) and wherein the inteins, which are fused to each half protein at the split site termini, are available to sufficiently interact with one another when one half protein contacts the other half protein inside the cell.

[0864] In some embodiments, the split site is located in the napDNAbp domain. In other embodiments, the split site is located in the RT domain. In other embodiments, the split site is located in a linker that joins the napDNAbp domain and the RT domain.

[0865] In various embodiments, split site design requires finding sites to split and insert an N- and C-terminal intein that are both structurally permissive for purposes of packaging the two half prime editor domains into two different AAV genomes. Additionally, intein residues necessary for trans splicing can be incorporated by mutating residues at the N terminus of the C terminal extein or inserting residues that will leave an intein “scar.”

[0866] Exemplary split configurations of split prime editors comprising either the SpCas9 nickase or the SaCas9 nickase are as follows.

S. PYOGENES PE, SPLIT AT LINKER, N TERMINAL PORTION
STRUCTURE: [N EXTEIN]-[N INTEIN]
(SEQ ID NO: 443)
MKRTADGSEFESPKKKRKVDKKYSIGLDIGTNSVGWAVITDEYKVPSKKFKVLG
NTDRHSIKKNLIGALLFDSGETAEATRLKRTARRRYTRRKNRICYLQEIFSNEM
AKVDDSFFHRLEESFLVEEDKKHERHPIFGNIVDEVAYHEKYPTIYHLRKKLVD
STDKADLRLIYLALAHMIKFRGHFLIEGDLNPDNSDVDKLFIQLVQTYNQLFE
ENPINASGVDAKAILSARLSKSRRLENLIAQLPGEKKNGLFGNLIALSLGLTPN
FKSNFDLAEDAKLQLSKDTYDDDLDNLLAQIGDQYADLFLAAKNLSDAILLSDI
LRVNTEITKAPLSASMIKRYDEHHQDLTLLKALVRQQLPEKYKEIFFDQSKNG
YAGYIDGGASQEEFYKFIKPILEKMDGTEELLVKLNREDLLRKQRTFDNGSIP
HQIHLGELHAILRRQEDFYPFLKDNREKIEKILTFRIPYYVGPLARGNSRFAWM
TRKSEETITPWNFEEVVDKGASAQSFIERMTNFDKNLPNEKVLPKHSLLYEYF
TVYNELTKVKYVTEGMRKPAFLSGEQKKAIVDLLFKTNRKVTVKQLKEDYF
KKIECFDSVEISGVEDRFNASLGTYHDLLKIIKDKDFLDNEENEDILEDIVLTLT
LFEDREMIEERLKTYAHLFDDKVMKQLKRRRYTGWGRLSRKLINGIRDKQSG
KTILDFLKSDGFANRNFMQLIHDDSLTFKEDIQKAQVSGQGDSLHEHIANLAG
SPAIKKGILQTVKVVDELVKVMGRHKPENIVIEMARENQTTQKGQKNSRER1VI
KRIEEGIKELGSQILKEHPVENTQLQNEKLYLYYLQNGRDMYVDQELDINRLS
DYDVDAIVPQSFLKDDSIDNKVLTRSDKNRGKSDNVPSEEVVKK1VIKNYWRQL
LNAKLITQRKFDNLTKAERGGLSELDKAGFIKRQLVETRQITKHVAQILDSR1VI
NTKYDENDKLIREVKVITLKSKLVSDFRKDFQFYKVREINNYHHAHDAYLNAV
VGTALIKKYPKLESEFVYGDYKVYDVRKMIAKSEQEIGKATAKYFFYSNIMNF
FKTEITLANGEIRKRPLIETNGETGEIVWDKGRDFATVRKVLSMPQVNIVKKT
EVQTGGFSKESILPKRNSDKLIARKKDWDPKKYGGFDSPTVAYSVLVVAKVEK
GKSKKLKSVKELLGITIMERSSFEKNPIDFLEAKGYKEVKKDLIIKLPKYSLFE
LENGRKRMLASAGELQKGNELALPSKYVNFLYLASHYEKLKGSPEDNEQKQL
FVEQHKHYLDEIIEQISEFSKRVILADANLDKVLSAYNKHRDKPIREQAENIIHL
FTLTNLGAPAAFKYFDTTIDRKRYTSTKEVLDATLIHQSITGLYETRIDLSQLGG
DSGGSSGGSCLSYETEILTVEYGLLPIGKIVEKRIECTVYSVDNNGNIYTQPVAQWH
DRGEQEVFEYCLEDGSLIRATKDHKFMTVDGQMLPIDEIFERELDLMRVDNLPNSG
GSKRTADGSEFEPKKKRKV
KEY:
NLS (SEQ ID NO: 124, 125)
CAS9 (SEQ ID NO: 445)
LINKER (SEQ ID NO: 446)
NPUN INTEIN (SEQ ID NO: 447)
S. PYOGENES PE, SPLIT AT LINKER, C TERMINAL PORTION
STRUCTURE: [C INTEIN]-[C EXTEIN]
(SEQ ID NO: 450)
MKRTADGSEFESPKKKRKVIKIATRKYLGKQNVYDIGVERDHNFALKNGFIASNCFNS
GSETPGTSESATPESSGGSSGGSSTLNIEDEYRLHETSKEPDVSLGSTWLSDFPQAWA
ETGGMGLAVRQAPLIIPLKATSTPVSIKQYPMSQEARLGIKPHIQRLLDQGILVPCQSPW
NTPLLPVKKPGTNDYRPVQDLREVNKRVEDIHPTVPNPYNLLSGLPPSHQWYTVLDLKD
AFFCLRLHPTSQPLFAFEWRDPEMGISGQLTWTRLPQGFKNSPTLFDEALHRDLADFRI
QHPDLILLQYVDDLLLAATSELDCQQGTRALLQTLGNLGYRASAKKAQICQKQVKYLGY
LLKEGQRWLTEARKETVMGQPTPKTPRQLREFLGTAGFCRLWIPGFAEMAAPLYPLTKT
GTLFNWGPDQQKAYQEIKQALLTAPALGLPDLTKPFELFVDEKQGYAKGVLTQKLGPW
RRPVAYLSKKLDPVAAGWPPCLRMVAAIAVLTKDAGKLTMGQPLVILAPHAVEALVKQP
PDRWLSNARMTHYQALLLDTDRVQFGPVVALNPATLLPLPEEGLQHNCLDILAEAHGTR
PDLTDQPLPDADHTWYTDGSSLLQEGQRKAGAAVTTETEVIWAKALPAGTSAQRAELIA
LTQALKMAEGKKLNVYTDSRYAFATAHIHGEIYRRRGLLTSEGKEIKNKDEILALLKALFL
PKRLSIIHCPGHQKGHSAEARGNRMADQAARKAAITETPDTSTLLIENSSPSGGSKRTA
DGSEFEPKKKRKV
KEY:
NLS (SEQ ID NO: 124, 125)
LINKER 1 (SEQ ID NO: 453)
LINKER 2 (SEQ ID NO: 174)
NPUC INTEIN (SEQ ID NO: 452)
RT (SEQ ID NO: 454)
S. AUREUS PE, SPLIT BETWEEN RESIDUES 740/741, N TERMINAL PORTION
STRUCTURE: [N EXTEIN]-[N INTEIN]
(SEQ ID NO: 458)
MKRTADGSEFESPKKKRKVGKRNYILGLAIGITSVGYGIIDYETRDVIDAGVRLF
KEANVENNEGRRSKRGARRLKRRRRHRIQRVKKLLFDYNLLTDHSELSGINP
YEARVKGLSQKLSEEEFSAALLHLAKRRGVHNVNEVEEDTGNELSTKEQISRN
SKALEEKYVAELQLERLKKDGEVRGSINRFKTSDYVKEAKQLLKVQKAYHQL
DQSFIDTYIDLLETRRTYYEGPGEGSPFGWKDIKEWYEMLMGHCTYFPEELR
SVKYAYNADLYNALNDLNNLVITRDENEKLEYYEKFQIIENVFKQKKKPTLKQ
IAKEILVNEEDIKGYRYTSTGKPEFTNLKVYHDIKDITARKEHENAELLDQIAKI
LTIYQSSEDIQEELTNLNSELTQEEIEQISNLKGYTGTHNLSLKAINLILDELWH
TNDNQIAIFNRLKLVPKKVDLSQQKEIPTTLVDDFILSPVVKRSFIQSIKVINAII
KKYGLPNDIIIELAREKNSKDAQKMINEMQKRNRQTNERIEEIIRTTGKENAK
YLIEKIKLHDMQEGKCLYSLEAIPLEDLLNNPFNYEVDHIIPRSVSFDNSFNNKV
LVKQEENSKKGNRTPFQYLSSSDSKISYETFKKHILNLAKGKGRISKTKKEYLL
EERDINRFSVQKDFINRNLVDTRYATRGLMNLLRSYFRVNNLDVKVKSINGGF
TSFLRRKWKFKKERNKGYKHHAEDALIIANADFIFKEWKKLDKAKKVMENQ
MFEEKQAECLSYETEILTVEYGLLPIGKIVEKRIECTVYSVDNNGNIYTQPVAQWH
DRGEQEVFEYCLEDGSLIRATKDHKFMTVDGQMLPIDEIFERELDLMRVDNLPNSG
GSKRTADGSEFEPKKKRKV
KEY:
NLS (SEQ ID NO: 124, 125)
CAS9 (SEQ ID NO: 460)
LINKER (SEQ ID NO: 174)
NPUN INTEIN (SEQ ID NO: 462)
S. AUREUS PE, SPLIT BETWEEN RESIDUES 740/741, C TERMINAL PORTION
STRUCTURE: [C INTEIN]-[C EXTEIN]
(SEQ ID NO: 465)
MKRTADGSEFESPKKKRKVIKIATRKYLGKQNVYDIGVERDHNFALKNGFIASNCFNE
IETEQEYKEIFITPHQIKHIKDFKDYKYSHRVDKKPNRKLINDTLYSTRKDDKG
NTLIVNNLNGLYDKDNDKLKKLINKSPEKLLMYHHDPQTYQKLKLIMEQYGD
EKNPLYKYYEETGNYLTKYSKKDNGPVIKKIKYYGNKLNAHLDITDDYPNSRN
KVVKLSLKPYRFDVYLDNGVYKFVTVKNLDVIKKENYYEVNSKCYEEAKKLK
KISNQAEFIASFYKNDLIKINGELYRVIGVNNDLLNRIEVNMIDITYREYLENMN
DKRPPHIIKTIASKTQSIKKYSTDILGNLYEVKSKKHPQIIKKGSGGSSGGSSGS
ETPGTSESATPESSGGSSGGSSTLNIEDEYRLHETSKEPDVSLGSTWLSDFPQAWAET
GGMGLAVRQAPLIIPLKATSTPVSIKQYPMSQEARLGIKPHIQRLLDQGILVPCQSPWNT
PLLPVKKPGTNDYRPVQDLREVNKRVEDIHPTVPNPYNLLSGLPPSHQWYTVLDLKDAF
FCLRLHPTSQPLFAFEWRDPEMGISGQLTWTRLPQGFKNSPTLFDEALHRDLADFRIQ
HPDLILLQYVDDLLLAATSELDCQQGTRALLQTLGNLGYRASAKKAQICQKQVKYLGYL
LKEGQRWLTEARKETVMGQPTPKTPRQLREFLGTAGFCRLWIPGFAEMAAPLYPLTKT
GTLFNWGPDQQKAYQEIKQALLTAPALGLPDLTKPFELFVDEKQGYAKGVLTQKLGPW
RRPVAYLSKKLDPVAAGWPPCLRMVAAIAVLTKDAGKLTMGQPLVILAPHAVEALVKQP
PDRWLSNARMTHYQALLLDTDRVQFGPVVALNPATLLPLPEEGLQHNCLDILAEAHGTR
PDLTDQPLPDADHTWYTDGSSLLQEGQRKAGAAVTTETEVIWAKALPAGTSAQRAELIA
LTQALKMAEGKKLNVYTDSRYAFATAHIHGEIYRRRGLLTSEGKEIKNKDEILALLKALFL
PKRLSIIHCPGHQKGHSAEARGNRMADQAARKAAITETPDTSTLLIENSSPSGGSKRTA
DGSEFEPKKKRKV
KEY:
NLS (SEQ ID NO: 124, 125)
CAS9 (SEQ ID NO: 467)
LINKER 1 (SEQ ID NO: 127)
LINKER 2 (SEQ ID NO: 174)
NPUC INTEIN (SEQ ID NO: 452)
RT (SEQ ID NO: 471)

[0867] In various embodiments, using SpCas9 nickase (SEQ ID NO: 18, 1368 amino acids) as an example, the split can between any two amino acids between 1 and 1368. Preferred splits, however, will be located between the central region of the protein, e.g., from amino acids 50-1250, or from 100-1200, or from 150-1150, or from 200-1100, or from 250-1050, or from 300-1000, or from 350-950, or from 400-900, or from 450-850, or from 500-800, or from 550-750, or from 600-700 of SEQ ID NO: 18. In specific exemplary embodiments, the split site may be between 740/741, or 801/802, or 1010/1011, or 1041/1042. In other embodiments the split site may be between 1/2, 2/3, 3/4, 4/5, 5/6, 6/7, 7/8, 8/9, 9/10, 10/11, 12/13, 14/15, 15/16, 17/18, 19/20, 20/21, 21/22, 22/23, 23/24, 24/25, 25/26, 26/27, 27/28, 28/29, 29/30, 30/31, 31/32, 32/33, 33/34, 34/35, 35/36, 36/37, 38/39, 39/40, 41/42, 42/43, 43/44, 44/45, 45/46, 46/47, 47/48, 48/49, 49/50, 51/52, 52/53, 53/54, 54/55, 55/56, 56/57, 57/58, 58/59, 59/60, 61/62, 62/63, 63/64, 64/65, 65/66, 66/67, 67/68, 68/69, 69/70, 71/72, 72/73, 73/74, 74/75, 75/76, 76/77, 77/78, 78/79, 79/80, 81/82, 82/83, 83/84, 84/85, 85/86, 86/87, 87/88, 88/89, 89/90, or between any two pairs of adjacent residues between 90-100, 100-150, 150-200, 200-250, 250-300, 300-350, 350-400, 450-500, 500-550, 550-600, 600-650, 650-700, 700-750, 750-800, 800-850, 850-900, 900-950, 950-1000, 1000-1050, 1050-1100, 1100-1150, 1150-1200, 1200-1250, 1250-1300, 1300-1350, and 1350-1368, relative to SpCas9 of SEQ ID NO: 18, at between any two corresponding residues in an amino acid sequence having at least 80%, 85%, 90%, 95%, 98%, 99%, or 99.9% sequence identity with SEQ ID NO: 18, or between any two corresponding residues in a variant or equivalent of SpCas9 of any of amino acid sequences SEQ ID NOs. 19-88, or an amino acid sequence having at least 80%, 85%, 90%, 95%, 98%, 99%, or 99.9% sequence identity with any of SEQ ID NOs: 19-88.

[0868] In various embodiments, the split intein sequences can be engineered by from the following intein sequences.

| NAME | SEQUENCE OF LIGAND-DEPENDENT INTEIN |
|---|---|
| 2-4 INTEIN: | CLAEGTRIFDPVTGTTHRIEDVVDGRKPIHVVAAAKDGTLLARPVV |
| | SWFDQGTRDVIGLRIAGGAIVWATPDHKVLTEYGWRAAGELRKGD |
| | RVAGPGGSGNSLALSLTADQMVSALLDAEPPILYSEYDPTSPFSEAS |
| | MMGLLTNLADRELVHMINWAKRVPGFVDLTLHDQAHLLECAWLEI |
| | LMIGLVWRSMEHPGKLLFAPNLLLDRNQGKCVEGMVEIFDMLLAT |
| | SSRFRMMNLQGEEFVCLKSIILLNSGVYTFLSSTLKSLEEKDHIHRA |
| | LDKITDTLIHLMAKAGLTLQQQHQRLAQLLLILSHIRHMSNKGMEH |
| | LYSMKYKNVVPLYDLLLEMLDAHRLHAGGSGASRVQAFADALDD |
| | KFLHDMLAEELRYSVIREVLPTRRARTFDLEVEELHTLVAEGVVVH |
| | NC (SEQ ID NO: 472) |
| 3-2 INTEIN | CLAEGTRIFDPVTGTTHRIEDVVDGRKPIHVVAVAKDGTLLARPVVS |
| | WFDQGTRDVIGLRIAGGAIVWATPDHKVLTEYGWRAAGELRKGDR |
| | VAGPGGSGNSLALSLTADQMVSALLDAEPPILYSEYDPTSPFSEASM |
| | MGLLTNLADRELVHMINWAKRVPGFVDLTLHDQAHLLECAWLEIL |
| | MIGLVWRSMEHPGKLLFAPNLLLDRNQGKCVEGMVEIFDMLLATS |
| | SRFRMMNLQGEEFVCLKSIILLNSGVYTFLSSTLKSLEEKDHIHRAL |
| | DKITDTLIHLMAKAGLTLQQQHQRLAQLLLILSHIRHMSNKGMEHL |
| | YSMKYTNVVPLYDLLLEMLDAHRLHAGGSGASRVQAFADALDDK |
| | FLHDMLAEELRYSVIREVLPTRRARTFDLEVEELHTLVAEGVVVHNC |
| | (SEQ ID NO: 473) |
| 30R3-1 INTEIN | CLAEGTRIFDPVTGTTHRIEDVVDGRKPIHVVAAAKDGTLLARPVV |
| | SWFDQGTRDVIGLRIAGGATVWATPDHKVLTEYGWRAAGELRKG |
| | DRVAGPGGSGNSLALSLTADQMVSALLDAEPPIPYSEYDPTSPFSEA |
| | SMMGLLTNLADRELVHMINWAKRVPGFVDLTLHDQAHLLECAWL |
| | EILMIGLVWRSMEHPGKLLFAPNLLLDRNQGKCVEGMVEIFDMLL |
| | ATSSRFRMMNLQGEEFVCLKSIILLNSGVYTFLSSTLKSLEEKDHIH |
| | RALDKITDTLIHLMAKAGLTLQQQHQRLAQLLLILSHIRHMSNKGM |
| | EHLYSMKYKNVVPLYDLLLEMLDAHRLHAGGSGASRVQAFADAL |
| | DDKFLHDMLAEGLRYSVIREVLPTRRARTFDLEVEELHTLVAEGVV |
| | VHNC (SEQ ID NO: 474) |
| 30R3-2 INTEIN | CLAEGTRIFDPVTGTTHRIEDVVDGRKPIHVVAAAKDGTLLARPVV |
| | SWFDQGTRDVIGLRIAGGATVWATPDHKVLTEYGWRAAGELRKG |
| | DRVAGPGGSGNSLALSLTADQMVSALLDAEPPILYSEYDPTSPFSEA |
| | SMMGLLTNLADRELVHMINWAKRVPGFVDLTLHDQAHLLECAWL |
| | EILMIGLVWRSMEHPGKLLFAPNLLLDRNQGKCVEGMVEIFDMLL |
| | ATSSRFRMMNLQGEEFVCLKSIILLNSGVYTFLSSTLKSLEEKDHIH |
| | RALDKITDTLIHLMAKAGLTLQQQHQRLAQLLLILSHIRHMSNKGM |
| | EHLYSMKYKNVVPLYDLLLEMLDAHRLHAGGSGASRVQAFADAL |
| | DDKFLHDMLAEELRYSVIREVLPTRRARTFDLEVEELHTLVAEGVV |
| | VHNC (SEQ ID NO: 475) |
| 30R3-3 INTEIN | CLAEGTRIFDPVTGTTHRIEDVVDGRKPIHVVAAAKDGTLLARPVV |
| | SWFDQGTRDVIGLRIAGGATVWATPDHKVLTEYGWRAAGELRKG |
| | DRVAGPGGSGNSLALSLTADQMVSALLDAEPPIPYSEYDPTSPFSEA |
| | SMMGLLTNLADRELVHMINWAKRVPGFVDLTLHDQAHLLECAWL |
| | EILMIGLVWRSMEHPGKLLFAPNLLLDRNQGKCVEGMVEIFDMLL |
| | ATSSRFRMMNLQGEEFVCLKSIILLNSGVYTFLSSTLKSLEEKDHIH |
| | RALDKITDTLIHLMAKAGLTLQQQHQRLAQLLLILSHIRHMSNKGM |
| | EHLYSMKYKNVVPLYDLLLEMLDAHRLHAGGSGASRVQAFADAL |
| | DDKFLHDMLAEELRYSVIREVLPTRRARTFDLEVEELHTLVAEGVV |
| | VHNC (SEQ ID NO: 476) |
| 37R3-1 INTEIN | CLAEGTRIFDPVTGTTHRIEDVVDGRKPIHVVAAAKDGTLLARPVV |
| | SWFDQGTRDVIGLRIAGGATVWATPDHKVLTEYGWRAAGELRKG |
| | DRVAGPGGSGNSLALSLTADQMVSALLDAEPPILYSEYNPTSPFSEA |
| | SMMGLLTNLADRELVHMINWAKRVPGFVDLTLHDQAHLLERAWL |
| | EILMIGLVWRSMEHPGKLLFAPNLLLDRNQGKCVEGMVEIFDMLL |
| | ATSSRFRMMNLQGEEFVCLKSIILLNSGVYTFLSSTLKSLEEKDHIH |
| | RALDKITDTLIHLMAKAGLTLQQQHQRLAQLLLILSHIRHMSNKGM |
| | EHLYSMKYKNVVPLYDLLLEMLDAHRLHAGGSGASRVQAFADAL |
| | DDKFLHDMLAEGLRYSVIREVLPTRRARTFDLEVEELHTLVAEGVV |
| | VHNC ((SEQ ID NO: 477) |
| 37R3-2 INTEIN | CLAEGTRIFDPVTGTTHRIEDVVDGRKPIHVVAAAKDGTLLARPVV |
| | SWFDQGTRDVIGLRIAGGAIVWATPDHKVLTEYGWRAAGELRKGD |
| | RVAGPGGSGNSLALSLTADQMVSALLDAEPPILYSEYDPTSPFSEAS |
| | MMGLLTNLADRELVHMINWAKRVPGFVDLTLHDQAHLLERAWLEI |
| | LMIGLVWRSMEHPGKLLFAPNLLLDRNQGKCVEGMVEIFDMLLAT |
| | SSRFRMMNLQGEEFVCLKSIILLNSGVYTFLSSTLKSLEEKDHIHRA |
| | LDKITDTLIHLMAKAGLTLQQQHQRLAQLLLILSHIRHMSNKGMEH |
| | LYSMKYKNVVPLYDLLLEMLDAHRLHAGGSGASRVQAFADALDD |
| | KFLHDMLAEGLRYSVIREVLPTRRARTFDLEVEELHTLVAEGVVVH |
| | NC (SEQ ID NO: 478) |
| 37R3-3 INTEIN | CLAEGTRIFDPVTGTTHRIEDVVDGRKPIHVVAVAKDGTLLARPVVS |
| | WFDQGTRDVIGLRIAGGATVWATPDHKVLTEYGWRAAGELRKGD |
| | RVAGPGGSGNSLALSLTADQMVSALLDAEPPILYSEYDPTSPFSEAS |
| | MMGLLTNLADRELVHMINWAKRVPGFVDLTLHDQAHLLERAWLEI |
| | LMIGLVWRSMEHPGKLLFAPNLLLDRNQGKCVEGMVEIFDMLLAT |
| | SSRFRMMNLQGEEFVCLKSIILLNSGVYTFLSSTLKSLEEKDHIHRA |
| | LDKITDTLIHLMAKAGLTLQQQHQRLAQLLLILSHIRHMSNKGMEH |
| | LYSMKYKNVVPLYDLLLEMLDAHRLHAGGSGASRVQAFADALDD |
| | KFLHDMLAEELRYSVIREVLPTRRARTFDLEVEELHTLVAEGVVVH |
| | NC (SEQ ID NO: 479) |

[0869] In various other embodiments, the split intein sequences can be used as follows:

| INTEIN-N | INTEIN-C |
|---|---|
| NPU-N | NPU-C |
| CLSYETEILTVEYGLLPIGKIVEK | IKIATRKYLGKQNVYDIGVERD |
| RIECTVYSVDNNGNIYTQPVAQWH | HNFALKNGFIASN |
| DRGEQEVFEYCLEDGSLIRATKDH | (SEQ ID NO: 452) |
| KFMTVDGQMLPIDEIFERELDLMR | |
| VDNLPNSGGS | |
| (SEQ ID NO: 447) | |

[0870] In various embodiments, the split inteins can be used to separately deliver separate portions of a complete PE fusion protein to a cell, which upon expression in a cell, become reconstituted as a complete PE fusion protein through the trans splicing.

[0871] In some embodiments, the disclosure provides a method of delivering a PE fusion protein to a cell, comprising:
[0872] (a) constructing a first expression vector encoding an N-terminal fragment of the PE fusion protein fused to a first split intein sequence;
[0873] (b) constructing a second expression vector encoding a C-terminal fragment of the PE fusion protein fused to a second split intein sequence;
[0874] (c) delivering the first and second expression vectors to a cell, wherein the N-terminal and C-terminal fragment are reconstituted as the PE fusion protein in the cell as a result of trans splicing activity causing self-excision of the first and second split intein sequences.

[0875] The split site in some embodiments can be anywhere in the prime editor fusion, including the napDNAbp domain, the linker, or the reverse transcriptase domain.

[0876] In other embodiments, the split site is in the napDNAbp domain.

[0877] In still other embodiments, the split site is in the reverse transcriptase or polymerase domain.

[0878] In yet other embodiments, the split site is in the linker.

[0879] In various embodiments, the present disclosure provides prime editors comprising a napDNAbp (e.g., a Cas9 domain) and a reverse transcriptase wherein one or both of the napDNAbp and/or the reverse transcriptase comprise an intein, for example, a ligand-dependent intein. Typically the intein is a ligand-dependent intein which exhibits no or minimal protein splicing activity in the absence of ligand (e.g., small molecules such as 4-hydroxytamoxifen, peptides, proteins, polynucleotides, amino acids, and nucleotides). Ligand-dependent inteins are known, and include those described in U.S. patent application U.S. Ser. No. 14/004,280, published as U.S. 2014/0065711 A1, the entire contents of which are incorporated herein by reference. In addition, use of split-Cas9 architecture In some embodiments, the intein comprises an amino acid sequence selected from the group consisting of SEQ ID NOs: 8-15, 447, 452, 462, and 472-479.

[0880] In various embodiments, the napDNAbp domains are smaller-sized napDNAbp domains as compared to the canonical SpCas9 domain of SEQ ID NO: 18.

[0881] The canonical SpCas9 protein is 1368 amino acids in length and has a predicted molecular weight of 158 kilodaltons. The term “small-sized Cas9 variant”, as used herein, refers to any Cas9 variant—naturally occurring, engineered, or otherwise—that is less than at least 1300 amino acids, or at least less than 1290 amino acids, or than less than 1280 amino acids, or less than 1270 amino acid, or less than 1260 amino acid, or less than 1250 amino acids, or less than 1240 amino acids, or less than 1230 amino acids, or less than 1220 amino acids, or less than 1210 amino acids, or less than 1200 amino acids, or less than 1190 amino acids, or less than 1180 amino acids, or less than 1170 amino acids, or less than 1160 amino acids, or less than 1150 amino acids, or less than 1140 amino acids, or less than 1130 amino acids, or less than 1120 amino acids, or less than 1110 amino acids, or less than 1100 amino acids, or less than 1050 amino acids, or less than 1000 amino acids, or less than 950 amino acids, or less than 900 amino acids, or less than 850 amino acids, or less than 800 amino acids, or less than 750 amino acids, or less than 700 amino acids, or less than 650 amino acids, or less than 600 amino acids, or less than 550 amino acids, or less than 500 amino acids, but at least larger than about 400 amino acids and retaining the required functions of the Cas9 protein.

[0882] In one embodiment, as depicted in Example 20, the specification embraces the following split-intein PE contructs, which are split between residues 1024 and 1025 of the canonical SpCas9 (SEQ ID NO: 18) (or which may be referred to as residues 1023 and 1024, respectively, relative to a Met-minus SEQ ID NO: 18).

[0883] First, the amino acid sequence of SEQ ID NO: 18 is shown as follows, indicating the location of the split site between 1024 (“K”) and 1025 (“S”) residues:

| Description | Sequence | SEQ ID NO: |
|---|---|---|
| SpCas9 | MDKKYSIGLDIGTNSVGWAVITDEYKVPSKKFKVLGN | SEQ ID NO: |
| Streptococcus | TDRHSIKKNLIGALLFDSGETAEATRLKRTARRRYTRR | 18, indicated |
| pyogenes | KNRICYLQEIFSNEMAKVDDSFFHRLEESFLVEEDKKH | with split site |
| M1 | ERHPIFGNIVDEVAYHEKYPTIYHLRKKLVDSTDKADL | 1024/1025 in |
| SwissProt | RLIYLALAHMIKFRGHFLIEGDLNPDNSDVDKLFIQLVQ | bold |
| Accession | TYNQLFEENPINASGVDAKAILSARLSKSRRLENLIAQL | The M at |
| No. | PGEKKNGLFGNLIALSLGLTPNFKSNFDLAEDAKLQLS | position 1 is |
| Q99ZW2 | KDTYDDDLDNLLAQIGDQYADLFLAAKNLSDAILLSDI | not necessarily |
| Wild type | LRVNTEITKAPLSASMIKRYDEHHQDLTLLKALVRQQL | present in the |
| | PEKYKEIFFDQSKNGYAGYIDGGASQEEFYKFIKPILEK | PE fusion |
| | MDGTEELLVKLNREDLLRKQRTFDNGSIPHQIHLGELH | protein in |
| | AILRRQEDFYPFLKDNREKIEKILTFRIPYYVGPLARGN | certain |
| | SRFAWMTRKSEETITPWNFEEVVDKGASAQSFIERMTN | embodiments. |
| | FDKNLPNEKVLPKHSLLYEYFTVYNELTKVKYVTEGM | Thus, the |
| | RKPAFLSGEQKKAIVDLLFKTNRKVTVKQLKEDYFKKI | numbering of |
| | ECFDSVEISGVEDRFNASLGTYHDLLKIIKDKDFLDNEE | the split site is |
| | NEDILEDIVLTLTLFEDREMIEERLKTYAHLFDDKVMK | 1023/1024 in |
| | QLKRRRYTGWGRLSRKLINGIRDKQSGKTILDFLKSDG | the case that |
| | FANRNFMQLIHDDSLTFKEDIQKAQVSGQGDSLHEHIA | the amino acid |
| | NLAGSPAIKKGILQTVKVVDELVKVMGRHKPENIVIEM | sequence |
| | ARENQTTQKGQKNSRERMKRIEEGIKELGSQILKEHPV | excludes Met |
| | ENTQLQNEKLYLYYLQNGRDMYVDQELDINRLSDYD | at position 1. |
| | VDHIVPQSFLKDDSIDNKVLTRSDKNRGKSDNVPSEEV | |
| | VKKMKNYWRQLLNAKLITQRKFDNLTKAERGGLSEL | |
| | DKAGFIKRQLVETRQITKHVAQILDSRMNTKYDENDK | |
| | LIREVKVITLKSKLVSDFRKDFQFYKVREINNYHHAHD | |
| | AYLNAVVGTALIKKYPKLESEFVYGDYKVYDVRKMIA | |
| | KSEQEIGKATAKYFFYSNIMNFFKTEITLANGEIRKRPLI | |
| | ETNGETGEIVWDKGRDFATVRKVLSMPQVNIVKKTEV | |
| | QTGGFSKESILPKRNSDKLIARKKDWDPKKYGGFDSPT | |
| | VAYSVLVVAKVEKGKSKKLKSVKELLGITIMERSSFEK | |
| | NPIDFLEAKGYKEVKKDLIIKLPKYSLFELENGRKRML | |
| | ASAGELQKGNELALPSKYVNFLYLASHYEKLKGSPED | |
| | NEQKQLFVEQHKHYLDEIIEQISEFSKRVILADANLDKV | |
| | LSAYNKHRDKPIREQAENIIHLFTLTNLGAPAAFKYFDT | |
| | TIDRKRYTSTKEVLDATLIHQSITGLYETRIDLSQLGGD | |

[0884] In this configuration, the amino acid sequence of N-terminal half (amino acids 1-1024) is as follows:

(SEQ ID NO: 3877)
MDKKYSIGLDIGTNSVGWAVITDEYKVPSKKFKVLGNTDRHSIKKNLIGA
LLFDSGETAEATRLKRTARRRYTRRKNRICYLQEIFSNEMAKVDDSFFHR
LEESFLVEEDKKHERHPIFGNIVDEVAYHEKYPTIYHLRKKLVDSTDKAD
LRLIYLALAHMIKFRGHFLIEGDLNPDNSDVDKLFIQLVQTYNQLFEENP
INASGVDAKAILSARLSKSRRLENLIAQLPGEKKNGLFGNLIALSLGLTP
NFKSNFDLAEDAKLQLSKDTYDDDLDNLLAQIGDQYADLFLAAKNLSDAI
LLSDILRVNTEITKAPLSASMIKRYDEHHQDLTLLKALVRQQLPEKYKEI
FFDQSKNGYAGYIDGGASQEEFYKFIKPILEKMDGTEELLVKLNREDLLR
KQRTFDNGSIPHQIHLGELHAILRRQEDFYPFLKDNREKIEKILTFRIPY
YVGPLARGNSRFAWMTRKSEETITPWNFEEVVDKGASAQSFIERMTNFDK
NLPNEKVLPKHSLLYEYFTVYNELTKVKYVTEGMRKPAFLSGEQKKAIVD
LLFKTNRKVTVKQLKEDYFKKIECFDSVEISGVEDRFNASLGTYHDLLKI
IKDKDFLDNEENEDILEDIVLTLTLFEDREMIEERLKTYAHLFDDKVMKQ
LKRRRYTGWGRLSRKLINGIRDKQSGKTILDFLKSDGFANRNFMQLIHDD
SLTFKEDIQKAQVSGQGDSLHEHIANLAGSPAIKKGILQTVKVVDELVKV
MGRHKPENIVIEMARENQTTQKGQKNSRERMKRIEEGIKELGSQILKEHP
VENTQLQNEKLYLYYLQNGRDMYVDQELDINRLSDYDVDAIVPQSFLKDD
SIDNKVLTRSDKNRGKSDNVPSEEVVKKMKNYWRQLLNAKLITQRKFDNL
TKAERGGLSELDKAGFIKRQLVETRQITKHVAQILDSRMNTKYDENDKLI
REVKVITLKSKLVSDFRKDFQFYKVREINNYHHAHDAYLNAVVGTALIKK
YPKLESEFVYGDYKVYDVRKMIAK.

[0885] In this configuration, the amino acid sequence of N-terminal half (amino acids 1-1023) (where the protein is Met-minus at position 1) is as follows:

(SEQ ID NO: 3878)
DKKYSIGLDIGTNSVGWAVITDEYKVPSKKFKVLGNTDRHSIKKNLIGAL
LFDSGETAEATRLKRTARRRYTRRKNRICYLQEIFSNEMAKVDDSFFHRL
EESFLVEEDKKHERHPIFGNIVDEVAYHEKYPTIYHLRKKLVDSTDKADL
RLIYLALAHMIKFRGHFLIEGDLNPDNSDVDKLFIQLVQTYNQLFEENPI
NASGVDAKAILSARLSKSRRLENLIAQLPGEKKNGLFGNLIALSLGLTPN
FKSNFDLAEDAKLQLSKDTYDDDLDNLLAQIGDQYADLFLAAKNLSDAIL
LSDILRVNTEITKAPLSASMIKRYDEHHQDLTLLKALVRQQLPEKYKEIF
FDQSKNGYAGYIDGGASQEEFYKFIKPILEKMDGTEELLVKLNREDLLRK
QRTFDNGSIPHQIHLGELHAILRRQEDFYPFLKDNREKIEKILTFRIPYY
VGPLARGNSRFAWMTRKSEETITPWNFEEVVDKGASAQSFIERMTNFDKN
LPNEKVLPKHSLLYEYFTVYNELTKVKYVTEGMRKPAFLSGEQKKAIVDL
LFKTNRKVTVKQLKEDYFKKIECFDSVEISGVEDRFNASLGTYHDLLKII
KDKDFLDNEENEDILEDIVLTLTLFEDREMIEERLKTYAHLFDDKVMKQL
KRRRYTGWGRLSRKLINGIRDKQSGKTILDFLKSDGFANRNFMQLIHDDS
LTFKEDIQKAQVSGQGDSLHEHIANLAGSPAIKKGILQTVKVVDELVKVM
GRHKPENIVIEMARENQTTQKGQKNSRERMKRIEEGIKELGSQILKEHPV
ENTQLQNEKLYLYYLQNGRDMYVDQELDINRLSDYDVDAIVPQSFLKDDS
IDNKVLTRSDKNRGKSDNVPSEEVVKKMKNYWRQLLNAKLITQRKFDNLT
KAERGGLSELDKAGFIKRQLVETRQITKHVAQILDSRMNTKYDENDKLIR
EVKVITLKSKLVSDFRKDFQFYKVREINNYHHAHDAYLNAVVGTALIKKY
PKLESEFVYGDYKVYDVRKMIAK.

[0886] In this configuration, the amino acid sequence of C-terminal half (amino acids 1024-1368 (or counted as amino acids 1023-1367 in a Met-minus Cas9) is as follows:

(SEQ ID NO: 3879)
SEQEIGKATAKYFFYSNIMNFFKTEITLANGEIRKRPLIETNGETGEIVW
DKGRDFATVRKVLSMPQVNIVKKTEVQTGGFSKESILPKRNSDKLIARKK
DWDPKKYGGFDSPTVAYSVLVVAKVEKGKSKKLKSVKELLGITIMERSSF
EKNPIDFLEAKGYKEVKKDLIIKLPKYSLFELENGRKRMLASAGELQKGN
ELALPSKYVNFLYLASHYEKLKGSPEDNEQKQLFVEQHKHYLDEIIEQIS
EFSKRVILADANLDKVLSAYNKHRDKPIREQAENIIHLFTLTNLGAPAAF
KYFDTTIDRKRYTSTKEVLDATLIHQSITGLYETRIDLSQLGGD.

[0887] As shown in Example 20, the PE2 (which is based on SpCas9 of SEQ ID NO: 18) construct was split at position 1023/1024 (relative to a Met-minus SEQ ID NO: 18) into two separate constructs, as follows:

SpPE2 split at 1023/1024 N terminal half
(SEQ ID NO: 3875)
MKRTADGSEFESPKKKRKVDKKYSIGLDIGTNSVGWAVITDEYKVPSKKFKV
LGNTDRHSIKKNLIGALLFDSGETAEATRLKRTARRRYTRRKNRICYLQEIFSNEMAK
VDDSFFHRLEESFLVEEDKKHERHPIFGNIVDEVAYHEKYPTIYHLRKKLVDSTDKAD
LRLIYLALAHMIKFRGHFLIEGDLNPDNSDVDKLFIQLVQTYNQLFEENPINASGVDA
KAILSARLSKSRRLENLIAQLPGEKKNGLFGNLIALSLGLTPNFKSNFDLAEDAKLQLS
KDTYDDDLDNLLAQIGDQYADLFLAAKNLSDAILLSDILRVNTEITKAPLSASMIKRY
DEHHQDLTLLKALVRQQLPEKYKEIFFDQSKNGYAGYIDGGASQEEFYKFIKPILEK
MDGTEELLVKLNREDLLRKQRTFDNGSIPHQIHLGELHAILRRQEDFYPFLKDNREKI
EKILTFRIPYYVGPLARGNSRFAWMTRKSEETITPWNFEEVVDKGASAQSFIERMTNF
DKNLPNEKVLPKHSLLYEYFTVYNELTKVKYVTEGMRKPAFLSGEQKKAIVDLLFK
TNRKVTVKQLKEDYFKKIECFDSVEISGVEDRFNASLGTYHDLLKIIKDKDFLDNEEN
EDILEDIVLTLTLFEDREMIEERLKTYAHLFDDKVMKQLKRRRYTGWGRLSRKLINGI
RDKQSGKTILDFLKSDGFANRNFMQLIHDDSLTFKEDIQKAQVSGQGDSLHEHIANL
AGSPAIKKGILQTVKVVDELVKVMGRHKPENIVIEMARENQTTQKGQKNSRERMKR
IEEGIKELGSQILKEHPVENTQLQNEKLYLYYLQNGRDMYVDQELDINRLSDYDVDA
IVPQSFLKDDSIDNKVLTRSDKNRGKSDNVPSEEVVKKMKNYWRQLLNAKLITQRK
FDNLTKAERGGLSELDKAGFIKRQLVETRQITKHVAQILDSRMNTKYDENDKLIREV
KVITLKSKLVSDFRKDFQFYKVREINNYHHAHDAYLNAVVGTALIKKYPKLESEFVY

[chemical structure]

[chemical structure]

KRTADGSEFEPKKKRKV

[chemical structure]

SpPE2 split at 1023/1024 C terminal half
(SEQ ID NO: 3876)

[chemical structure]

KATAKYFFYSNIMNFFKTEITLANGEIRKRPLIETNGETGEIVWDKGRDFATVRKVLS
MPQVNIVKKTEVQTGGFSKESILPKRNSDKLIARKKDWDPKKYGGFDSPTVAYSVLV
VAKVEKGKSKKLKSVKELLGITIMERSSFEKNPIDFLEAKGYKEVKKDLIIKLPKYSLF
ELENGRKRMLASAGELQKGNELALPSKYVNFLYLASHYEKLKGSPEDNEQKQLFVE
QHKHYLDEIIEQISEFSKRVILADANLDKVLSAYNKHRDKPIREQAENIIHLFTLTNLG

[chemical structure]

[chemical structure]

WAETGGMGLAVRQAPLIIPLKATSTPVSIKQYPMSQEARLGIKPHIQRLLDQGIL
VPCQSPWNTPLLPVKKPGTNDYRPVQDLREVNKRVEDIHPTVPNPYNLLSGLPP
SHQWYTVLKLKDAFFCLRLHPTSQPLFAFEWRDPEMGISGQLTWTRLPQGFKN
SPTLFNEALHRDLADFRIQHPDLILLQYVDDLLLAATSELDCQQGTRALLQTLG
NLGYRASAKKAQICQKQVKYLGYLLKEGQRWLTEARKETVMGQPTPKTPRQL
REFLGKAGFCRLFIPGFAEMAAPLYPLTKPGTLFNWGPDQQKAYQEIKQALLT
APALGLPDLTKPFELFVDEKQGYAKGVLTQKLGPWRRPVAYLSKKLDPVAAG
WPPCLRMVAAIAVLTKDAGKLTMGQPLVILAPHAVEALVKQPPDRWLSNARM
THYQALLLDTDRVQFGPVVALNPATLLPLPEEGLQHNCLDILAEAHGTRPDLTD
QPLPDADHTWYTDGSSLLQEGQRKAGAAVTTETEVIWAKALPAGTSAQRAELI
ALTQALKMAEGKKLNVYTDSRYAFATAHIHGEIYRRRGWLTSEGKEIKNKDEI
LALLKALFLPKRLSIIHCPGHQKGHSAEARGNRMADQAARKAAITETPDTSTLLI

[chemical structure]

[chemical structure]

[0888] The present disclosure also contemplates methods of delivering split-intein prime editors to cells and/or treating cells with split-intein prime editors.

[0889] In some embodiments, the disclosure provides a method of delivering a PE fusion protein to a cell, comprising:

```
  (a) constructing a first expression vector encoding an N-terminal fragment of the PE fusion
      protein fused to a first split intein sequence;
  (b) constructing a second expression vector encoding a C-terminal fragment of the PE fusion
      protein fused to a second split intein sequence;
  (c) delivering the first and second expression vectors to a cell,
wherein the N-terminal and C-terminal fragment are reconstituted as the PE fusion protein in the
cell as a result of trans splicing activity causing self-excision of the first and second split intein
sequences.
```

[0890] In certain embodiments, the N-terminal fragment of the PE fusion protein fused to a first split intein sequence is SEQ ID NO: 3875, or an amino acid sequence having at least 80%, at least 85%, at least 90%, at least 95%, at least 98%, or at least 99.9% sequence identity with SEQ ID NO: 3875.

[0891] In other embodiments, the C-terminal fragment of the PE fusion protein fused to a first split intein sequence is SEQ ID NO: 3876, or an amino acid sequence having at least 80%, at least 85%, at least 90%, at least 95%, at least 98%, or at least 99.9% sequence identity with SEQ ID NO: 3876.

[0892] In other embodiments, the disclosure provides a method of editing a target DNA sequence within a cell, comprising:

```
(a) constructing a first expression vector encoding an N-terminal fragment of the PE fusion
    protein fused to a first split intein sequence;
(b) constructing a second expression vector encoding a C-terminal fragment of the PE fusion
    protein fused to a second split intein sequence;
(c) delivering the first and second expression vectors to a cell,
wherein the N-terminal and C-terminal fragment are reconstituted as the PE fusion protein in the
cell as a result of trans splicing activity causing self-excision of the first and second split intein
sequences.
```

wherein the N-terminal and C-terminal fragment are reconstituted as the PE fusion protein in the cell as a result of trans splicing activity causing self-excision of the first and second split intein sequences.

[0893] In certain embodiments, the N-terminal fragment of the PE fusion protein fused to a first split intein sequence is SEQ ID NO: 3875, or an amino acid sequence having at least 80%, at least 85%, at least 90%, at least 95%, at least 98%, or at least 99.9% sequence identity with SEQ ID NO: 3875.

[0894] In other embodiments, the C-terminal fragment of the PE fusion protein fused to a first split intein sequence is SEQ ID NO: 3876, or an amino acid sequence having at least 80%, at least 85%, at least 90%, at least 95%, at least 98%, or at least 99.9% sequence identity with SEQ ID NO: 3876.

### Delivery of PE Ribonucleoprotein Complexes

[0895] In this aspect, the prime editors may be delivered by non-viral delivery strategies involving delivery of a prime editor complexed with a PEgRNA (i.e., a PE ribonucleoprotein complex) by various methods, including electroporation and lipid nanoparticles. Methods of non-viral delivery of nucleic acids include lipofection, nucleofection, microinjection, biolistics, virosomes, liposomes, immunoliposomes, polycation or lipid:nucleic acid conjugates, naked DNA, artificial virions, and agent-enhanced uptake of DNA. Lipofection is described in e.g., U.S. Pat. Nos. 5,049,386, 4,946,787; and 4,897,355) and lipofection reagents are sold commercially (e.g., Transfectam™ and Lipofectin™). Cationic and neutral lipids that are suitable for efficient receptor-recognition lipofection of polynucleotides include those of Feigner, WO 91/17424; WO 91/16024. Delivery can be to cells (e.g. in vitro or ex vivo administration) or target tissues (e.g. in vivo administration).

[0896] The preparation of lipid:nucleic acid complexes, including targeted liposomes such as immunolipid complexes, is well known to one of skill in the art (see, e.g., Crystal, Science 270:404-410 (1995); Blaese et al., Cancer Gene Ther. 2:291-297 (1995); Behr et al., Bioconjugate Chem. 5:382-389 (1994); Remy et al., Bioconjugate Chem. 5:647-654 (1994); Gao et al., Gene Therapy 2:710-722 (1995); Ahmad et al., Cancer Res. 52:4817-4820 (1992); U.S. Pat. Nos. 4,186,183, 4,217,344, 4,235,871, 4,261,975, 4,485,054, 4,501,728, 4,774,085, 4,837,028, and 4,946,787).

[0897] Additional reference may be made to the following references that discuss approaches for non-viral delivery of ribonucleoprotein complexes, each of which are incorporated herein by reference.

[0898] Chen, Sean, et al. “Highly efficient mouse genome editing by CRISPR ribonucleoprotein electroporation of zygotes.” Journal of Biological Chemistry (2016): jbc-M116. PubMed

[0899] Zuris, John A., et al. “Cationic lipid-mediated delivery of proteins enables efficient protein-based genome editing in vitro and in vivo.” Nature biotechnology 33.1 (2015): 73. PubMed

[0900] Rouet, Romain, et al. “Receptor-Mediated Delivery of CRISPR-Cas9 Endonuclease for Cell-Type-Specific Gene Editing.” Journal of the American Chemical Society 140.21 (2018): 6596-6603. PubMed.

[0901] FIG. 68C provides data showing that various disclosed PE ribonucleoprotein complexes (PE2 at high concentration, PE3 at high concentration and PE3 at low concentration) can be delivered in this manner.

Delivery of PE by mRNA

[0902] Another method that may be employed to deliver prime editors and/or PEgRNAs to cells in which prime editing-based genome editing is desired is by employing the use of messenger RNA (mRNA) delivery methods and technologies. Examples of mRNA delivery methods and compositions that may be utilized in the present disclosure including, for example, PCT/US2014/028330, U.S. Pat. No. 8,822,663B2, NZ700688A, ES2740248T3, EP2755693A4, EP2755986A4, WO2014152940A1, EP3450553B1, BR112016030852A2, and EP3362461A1, each of which are incorporated herein by reference in their entireties. Additional disclosure hereby incorporated by reference can be found in Kowalski et al., “Delivering the Messenger: Advances in Technologies for Therapeutic mRNA Delivery,” Mol Therap., 2019; 27(4): 710-728.

[0903] In contrast to DNA vector encoding prime editors, the use of RNA as delivery agent for prime editors has the advantage that the genetic material does not have to enter the nucleus to perform its function. The delivered mRNA may be directly translated in the cytoplasm into the desired protein (e.g., prime editor fusion protein) and nucleic acid products (e.g., PEgRNA). However, in order to be more stable (e.g., resist RNA-degrading enzymes in the cytoplasm), it is in some embodiments necessary to stabilize the mRNA to improve delivery efficiency. Certain delivery carriers such as cationic lipids or polymeric delivery carriers can also help protect the transfected mRNA from endogenous RNase enzymes that might otherwise degrade the therapeutic mRNA encoding the desired prime editor fusion proteins. In addition, despite the increased stability of modified mRNA, delivery of mRNA, particularly mRNA encoding full-length protein, to cells in vivo in a manner that allows therapeutic levels of protein production remains a challenge.

[0904] With some exceptions, the intracellular delivery of mRNA is generally more challenging than that of small oligonucleotides, and it requires encapsulation into a delivery nanoparticle, in part due to the significantly larger size of mRNA molecules (300-5,000 kDa, ˜1-15 kb) as compared to other types of RNAs (small interfering RNAs [siRNAs], −14 kDa; antisense oligonucleotides [ASOs], 4-10 kDa).

[0905] mRNA must cross the cell membrane in order to reach the cytoplasm. The cell membrane is a dynamic and formidable barrier to intracellular delivery. It is made up primarily of a lipid bilayer of zwitterionic and negatively charged phospholipids, where the polar heads of the phospholipids point toward the aqueous environment and the hydrophobic tails form a hydrophobic core.

[0906] In some embodiments, the mRNA compositions of the disclosure comprise mRNA (encoding a prime editor and/or PEgRNA), a transport vehicle, and optionally an agent that facilitates contact with the target cell and subsequent transfection.

[0907] In some embodiments, the mRNA can include one or more modifications that confer stability to the mRNA (eg, compared to the wild-type or native version of the mRNA) and is involved in the associated abnormal expression of the protein. One or more modifications to the wild type that correct the defect may also be included. For example, the nucleic acids of the invention can include modifications of one or both of a 5′ untranslated region or a 3′ untranslated region. Such modifications may include the inclusion of sequences encoding a partial sequence of the cytomegalovirus (CMV) immediate early 1 (IE1) gene, poly A tail, Cap1 structure, or human growth hormone (hGH). In some embodiments, the mRNA is modified to reduce mRNA immunogenicity.

[0908] In one embodiment, the “prime editor” mRNA in the composition of the invention can be formulated in a liposome transfer vehicle to facilitate delivery to target cells. Contemplated transfer vehicles can include one or more cationic lipids, non-cationic lipids, and/or PEG-modified lipids. For example, the transfer vehicle can include at least one of the following cationic lipids: C12-200, DLin-KC2-DMA, DODAP, HGT4003, ICE, HGT5000, or HGT5001. In embodiments, the transfer vehicle comprises cholesterol (chol) and/or PEG modified lipids. In some embodiments, the transfer vehicle comprises DMG-PEG2K. In certain embodiments, the transfer vehicle has the following lipid formulation: C12-200, DOPE, chol, DMG-PEG2K; DODAP, DOPE, cholesterol, DMG-PEG2K; HGT5000, DOPE, chol, DMG-PEG2K, HGT5001, DOPE, chol, one of DMG-PEG2K.

[0909] The present disclosure also provides compositions and methods useful for facilitating transfection of target cells with one or more PE-encoding mRNA molecules. For example, the compositions and methods of the present invention contemplate the use of targeting ligands that can increase the affinity of the composition for one or more target cells. In one embodiment, the targeting ligand is apolipoprotein B or apolipoprotein E, and the corresponding target cells express low density lipoprotein receptors and thus promote recognition of the targeting ligand. A vast number of target cells can be preferentially targeted using the methods and compositions of the present disclosure. For example, contemplated target cells include hepatocytes, epithelial cells, hematopoietic cells, epithelial cells, endothelial cells, lung cells, bone cells, stem cells, mesenchymal cells, nerve cells, heart cells, adipocytes, vascular smooth muscle Includes cells, cardiomyocytes, skeletal muscle cells, beta cells, pituitary cells, synovial lining cells, ovarian cells, testis cells, fibroblasts, B cells, T cells, reticulocytes, leukocytes, granulocytes, and tumor cells However, it is not limited to these.

[0910] In some embodiments, the PE-encoding mRNA may optionally have chemical or biological modifications which, for example, improve the stability and/or half-life of such mRNA or which improve or otherwise facilitate protein production. Upon transfection, a natural mRNA in the compositions of the invention may decay with a half-life of between 30 minutes and several days. The mRNAs in the compositions of the disclosure may retain at least some ability to be translated, thereby producing a functional protein or enzyme. Accordingly, the invention provides compositions comprising and methods of administering a stabilized mRNA. In some embodiments, the activity of the mRNA is prolonged over an extended period of time. For example, the activity of the mRNA may be prolonged such that the compositions of the present disclosure are administered to a subject on a semi-weekly or bi-weekly basis, or more preferably on a monthly, bi-monthly, quarterly or an annual basis. The extended or prolonged activity of the mRNA of the present invention is directly related to the quantity of protein or enzyme produced from such mRNA. Similarly, the activity of the compositions of the present disclosure may be further extended or prolonged by modifications made to improve or enhance translation of the mRNA. Furthermore, the quantity of functional protein or enzyme produced by the target cell is a function of the quantity of mRNA delivered to the target cells and the stability of such mRNA. To the extent that the stability of the mRNA of the present invention may be improved or enhanced, the half-life, the activity of the produced protein or enzyme and the dosing frequency of the composition may be further extended.

[0911] Accordingly, in some embodiments, the mRNA in the compositions of the disclosure comprise at least one modification which confers increased or enhanced stability to the nucleic acid, including, for example, improved resistance to nuclease digestion in vivo. As used herein, the terms “modification” and “modified” as such terms relate to the nucleic acids provided herein, include at least one alteration which preferably enhances stability and renders the mRNA more stable (e.g., resistant to nuclease digestion) than the wild-type or naturally occurring version of the mRNA. As used herein, the terms “stable” and “stability” as such terms relate to the nucleic acids of the present invention, and particularly with respect to the mRNA, refer to increased or enhanced resistance to degradation by, for example nucleases (i.e., endonucleases or exonucleases) which are normally capable of degrading such mRNA. Increased stability can include, for example, less sensitivity to hydrolysis or other destruction by endogenous enzymes (e.g., endonucleases or exonucleases) or conditions within the target cell or tissue, thereby increasing or enhancing the residence of such mRNA in the target cell, tissue, subject and/or cytoplasm. The stabilized mRNA molecules provided herein demonstrate longer half-lives relative to their naturally occurring, unmodified counterparts (e.g. the wild-type version of the mRNA). Also contemplated by the terms “modification” and “modified” as such terms related to the mRNA of the present invention are alterations which improve or enhance translation of mRNA nucleic acids, including for example, the inclusion of sequences which function in the initiation of protein translation (e.g., the Kozak consensus sequence). (Kozak, M., Nucleic Acids Res 15 (20): 8125-48 (1987)).

[0912] In some embodiments, the mRNAs used in the compositions of the disclosure have undergone a chemical or biological modification to render them more stable. Exemplary modifications to an mRNA include the depletion of a base (e.g., by deletion or by the substitution of one nucleotide for another) or modification of a base, for example, the chemical modification of a base. The phrase “chemical modifications” as used herein, includes modifications which introduce chemistries which differ from those seen in naturally occurring mRNA, for example, covalent modifications such as the introduction of modified nucleotides, (e.g., nucleotide analogs, or the inclusion of pendant groups which are not naturally found in such mRNA molecules).

[0913] Other suitable polynucleotide modifications that may be incorporated into the PE-encoding mRNA used in the compositions of the disclosure include, but are not limited to, 4′-thio-modified bases: 4′-thio-adenosine, 4′-thio-guanosine, 4′-thio-cytidine, 4′-thio-uridine, 4′-thio-5-methyl-cytidine, 4′-thio-pseudouridine, and 4′-thio-2-thiouridine, pyridin-4-one ribonucleoside, 5-aza-uridine, 2-thio-5-aza-uridine, 2-thiouridine, 4-thio-pseudouridine, 2-thio-pseudouridine, 5-hydroxyuridine, 3-methyluridine, 5-carboxymethyl-uridine, 1-carboxymethyl-pseudouridine, 5-propynyl-uridine, 1-propynyl-pseudouridine, 5-taurinomethyluridine, 1-taurinomethyl-pseudouridine, 5-taurinomethyl-2-thio-uridine, 1-taurinomethyl-4-thio-uridine, 5-methyl-uridine, 1-methyl-pseudouridine, 4-thio-1-methyl-pseudouridine, 2-thio-1-methyl-pseudouridine, 1-methyl-1-deaza-pseudouridine, 2-thio-1-methyl-1-deaza-pseudouridine, dihydrouridine, dihydropseudouridine, 2-thio-dihydrouridine, 2-thio-dihydropseudouridine, 2-methoxyuridine, 2-methoxy-4-thio-uridine, 4-methoxy-pseudouridine, 4-methoxy-2-thio-pseudouridine, 5-aza-cytidine, pseudoisocytidine, 3-methyl-cytidine, N4-acetylcytidine, 5-formylcytidine, N4-methylcytidine, 5-hydroxymethylcytidine, 1-methyl-pseudoisocytidine, pyrrolo-cytidine, pyrrolo-pseudoisocytidine, 2-thio-cytidine, 2-thio-5-methyl-cytidine, 4-thio-pseudoisocytidine, 4-thio-1-methyl-pseudoisocytidine, 4-thio-1-methyl-1-deaza-pseudoisocytidine, 1-methyl-1-deaza-pseudoisocytidine, zebularine, 5-aza-zebularine, 5-methyl-zebularine, 5-aza-2-thio-zebularine, 2-thio-zebularine, 2-methoxy-cytidine, 2-methoxy-5-methyl-cytidine, 4-methoxy-pseudoisocytidine, 4-methoxy-1-methyl-pseudoisocytidine, 2-aminopurine, 2,6-diaminopurine, 7-deaza-adenine, 7-deaza-8-aza-adenine, 7-deaza-2-aminopurine, 7-deaza-8-aza-2-aminopurine, 7-deaza-2,6-diaminopurine, 7-deaza-8-aza-2,6-diaminopurine, 1-methyladenosine, N6-methyladenosine, N6-isopentenyladenosine, N6-(cis-hydroxyisopentenyl)adenosine, 2-methylthio-N6-(cis-hydroxyisopentenyl)adenosine, N6-glycinylcarbamoyladenosine, N6-threonylcarbamoyladeno sine, 2-methylthio-N6-threonyl carbamoyladenosine, N6,N6-dimethyladenosine, 7-methyladenine, 2-methylthio-adenine, and 2-methoxy-adenine, inosine, 1-methyl-inosine, wyosine, wybutosine, 7-deaza-guanosine, 7-deaza-8-aza-guanosine, 6-thio-guanosine, 6-thio-7-deaza-guanosine, 6-thio-7-deaza-8-aza-guanosine, 7-methyl-guanosine, 6-thio-7-methyl-guanosine, 7-methylinosine, 6-methoxy-guanosine, 1-methylguanosine, N2-methylguanosine, N2,N2-dimethylguanosine, 8-oxo-guanosine, 7-methyl-8-oxo-guanosine, 1-methyl-6-thio-guanosine, N2-methyl-6-thio-guanosine, and N2,N2-dimethyl-6-thio-guanosine, and combinations thereof. The term modification also includes, for example, the incorporation of non-nucleotide linkages or modified nucleotides into the mRNA sequences of the present invention (e.g., modifications to one or both of the 3′ and 5′ ends of an mRNA molecule encoding a functional protein or enzyme). Such modifications include the addition of bases to an mRNA sequence (e.g., the inclusion of a poly A tail or a longer poly A tail), the alteration of the 3′ UTR or the 5′ UTR, complexing the mRNA with an agent (e.g., a protein or a complementary nucleic acid molecule), and inclusion of elements which change the structure of an mRNA molecule (e.g., which form secondary structures).

[0914] In some embodiments, PE-encoding mRNAs include a 5′ cap structure. A 5′ cap is typically added as follows: first, an RNA terminal phosphatase removes one of the terminal phosphate groups from the 5′ nucleotide, leaving two terminal phosphates; guanosine triphosphate (GTP) is then added to the terminal phosphates via a guanylyl transferase, producing a 5′5′5 triphosphate linkage; and the 7-nitrogen of guanine is then methylated by a methyltransferase. Examples of cap structures include, but are not limited to, m7G(5′)ppp (5′(A,G(5′)ppp(5′)A and G(5′)ppp(5′)G. Naturally occurring cap structures comprise a 7-methyl guanosine that is linked via a triphosphate bridge to the 5′-end of the first transcribed nucleotide, resulting in a dinucleotide cap of m7G(5′)ppp(5′)N, where N is any nucleoside. In vivo, the cap is added enzymatically. The cap is added in the nucleus and is catalyzed by the enzyme guanylyl transferase. The addition of the cap to the 5′ terminal end of RNA occurs immediately after initiation of transcription. The terminal nucleoside is typically a guanosine, and is in the reverse orientation to all the other nucleotides, i.e., G(5′)ppp(5′)GpNpNp.

[0915] Additional cap analogs include, but are not limited to, a chemical structures selected from the group consisting of m7GpppG, m7GpppA, m7GpppC; unmethylated cap analogs (e.g., GpppG); dimethylated cap analog (e.g., m2,7GpppG), trimethylated cap analog (e.g., m2,2,7GpppG), dimethylated symmetrical cap analogs (e.g., m7Gpppm7G), or anti reverse cap analogs (e.g., ARCA; m7, 2′OmeGpppG, m72′dGpppG, m7, 3′OmeGpppG, m7, 3′dGpppG and their tetraphosphate derivatives) (see, e.g., Jemielity, J. et al., “Novel ‘anti-reverse’ cap analogs with superior translational properties”, RNA, 9: 1108-1122 (2003)).

[0916] Typically, the presence of a “tail” serves to protect the mRNA from exonuclease degradation. A poly A or poly U tail is thought to stabilize natural messengers and synthetic sense RNA. Therefore, in certain embodiments a long poly A or poly U tail can be added to an mRNA molecule thus rendering the RNA more stable. Poly A or poly U tails can be added using a variety of art-recognized techniques. For example, long poly A tails can be added to synthetic or in vitro transcribed RNA using poly A polymerase (Yokoe, et al. Nature Biotechnology. 1996; 14: 1252-1256). A transcription vector can also encode long poly A tails. In addition, poly A tails can be added by transcription directly from PCR products. Poly A may also be ligated to the 3′ end of a sense RNA with RNA ligase (see, e.g., Molecular Cloning A Laboratory Manual, 2nd Ed., ed. by Sambrook, Fritsch and Maniatis (Cold Spring Harbor Laboratory Press: 1991 edition)).

[0917] Typically, the length of a poly A or poly U tail can be at least about 10, 50, 100, 200, 300, 400 at least 500 nucleotides. In some embodiments, a poly-A tail on the 3′ terminus of mRNA typically includes about 10 to 300 adenosine nucleotides (e.g., about 10 to 200 adenosine nucleotides, about 10 to 150 adenosine nucleotides, about 10 to 100 adenosine nucleotides, about 20 to 70 adenosine nucleotides, or about 20 to 60 adenosine nucleotides). In some embodiments, mRNAs include a 3′ poly(C) tail structure. A suitable poly-C tail on the 3′ terminus of mRNA typically include about 10 to 200 cytosine nucleotides (e.g., about 10 to 150 cytosine nucleotides, about 10 to 100 cytosine nucleotides, about 20 to 70 cytosine nucleotides, about 20 to 60 cytosine nucleotides, or about 10 to 40 cytosine nucleotides). The poly-C tail may be added to the poly-A or poly U tail or may substitute the poly-A or poly U tail.

[0918] PE-encoding mRNAs according to the present disclosure may be synthesized according to any of a variety of known methods. For example, mRNAs according to the present invention may be synthesized via in vitro transcription (IVT). Briefly, IVT is typically performed with a linear or circular DNA template containing a promoter, a pool of ribonucleotide triphosphates, a buffer system that may include DTT and magnesium ions, and an appropriate RNA polymerase (e.g., T3, T7 or SP6 RNA polymerase), DNAse I, pyrophosphatase, and/or RNAse inhibitor. The exact conditions will vary according to the specific application.

[0919] In embodiments involving mRNA delivery, the ratio of the mRNA encoding the PE fusion protein to the PEgRNA may be important for efficient editing. In certain embodiments, the weight ratio of mRNA (encoding the PE fusion protein) to PEgRNA is 1:1. In certain other embodiments, the weight ratio of mRNA (encoding the PE fusion protein) to PEgRNA is 2:1. In still other embodiments, the weight ratio of mRNA (encoding the PE fusion protein) to PEgRNA is 1:2. In still further embodiments, the weight ratio of mRNA (encoding the PE fusion protein) to PEgRNA is selected from the group consisting of about 1:1000, 1:900; 1:800; 1:700; 1:600; 1:500; 1:400; 1:300; 1:200; 1:100; 1:90; 1:80; 1:70; 1:60; 1:50; 1:40; 1:30; 1:20; 1:10; and 1:1. In other embodiments, the weight ratio of mRNA (encoding the PE fusion protein) to PEgRNA is selected from the group consisting of about 1:1000, 1:900; 800:1; 700:1; 600:1; 500:1; 400:1; 300:1; 200:1; 100:1; 90:1; 80:1; 70:1; 60:1; 50:1; 40:1; 30:1; 20:1; 10:1; and 1:1.

[0920] J. Use of Prime Editing for Identifying Off-Target Editing in an Unbiased Manner

[0921] Like other genome editors, there exists some risk that PE may introduce its programmed genetic alterations at unintended sites around the genome, i.e., “off-target” sites. However, there are currently no described methods to detect off-target editing with prime editors. Such methods would allow the identification of potential sites of off-target editing using prime editors.

[0922] The key concept of this aspect is the idea of using prime editing to insert the same adapter sequence and/or primer binding site at on-target and off-target sites, templated from the same PEgRNA, to enable the rapid identification of genomic off-target modification sites of napDNAbp nucleases or prime editors. This method is distinguished from other techniques that identify nuclease off-target sites because the adapter and/or primer binding sequence is inserted in the same event as DNA binding and nicking by the napDNAbp, simplifying the downstream processing.

[0923] FIG. 33 illustrates the basic principle of off-target identification. The figure is a schematic showing PEgRNA design for primer binding sequence insertions and primer binding insertion into genomic DNA using prime editing for determining off-target editing. In this embodiment, prime editing is conducted inside a living cell, a tissue, or an animal model. As a first step, an appropriate PEgRNA is designed. The top schematic shows a exemplary PEgRNA that may be used in this aspect. The spacer in the PEgRNA (labeled as “protospacer”) is complementary to one of the strands of the genomic target. The PE:PEgRNA complex (i.e., the PE complex) installs a single stranded 3′ end flap at the nick site which contains the encoded primer binding sequence and the region of homology (coded by the homology arm of the PEgRNA) that is complementary to the region just downstream of the cut site (in bold). Through flap invasion and DNA repair/replication processes, the synthesized strand becomes incorporated into the DNA, thereby installing the primer binding site. This process can occur at the desired genomic target, but also at other genomic sites that might interact with the PEgRNA in an off-target manner (i.e., the PEgRNA guides the PE complex to other off-target sites due to the complementarity of the spacer region to other genomic sites that are not the intended genomic site). Thus, the primer binding sequence may be installed not only at the desired genomic target, but at off-target genomic sites elsewhere in the genome. In order to detect the insertion of these primer binding sites at both the intended genomic target sites and the off-target genomic sites, the genomic DNA (post-PE) can be isolated, fragmented, and ligated to adapter nucleotides. Next, PCR may be carried out with PCR oligonucleotides that anneal to the adapters and to the inserted primer binding sequence to amplify on-target and off-target genomic DNA regions into which the primer binding site was inserted by PE. High throughput sequencing then may be conducted, as well as sequence alignments, to identify the insertion points of PE-inserted primer binding sequences at either the on-target site or at off-target sites.

[0924] Thus, FIG. 33 illustrates one aspect regarding the identification of off-target editing sites when editing inside a living cell, in tissue culture or animal models. To conduct this method, a PEgRNA is generated that has an identical spacer to the final desired prime editor (and, if looking at prime editing off-targets, an identical primer-binding site sequence to the final desired editor), but includes the necessary sequences to install an adapter or primer binding site after reverse transcription by prime editing. In vivo editing is conducted using a prime editor or RT-fused nuclease, and isolate genomic DNA. The genomic DNA is fragmented by enzymatic or mechanical means and append a different adapter to sites of DNA fragmentation. PCR is used to amplify from one adapter to the adapter installed via PEgRNA. The resulting product is deep-sequenced to identify all modified sites.

[0925] In another aspect, evaluation of off-target editing by PE may be conducted in vitro. In this aspect, PE may be used during in vitro modification of genomic DNA identification of off-target editing sites using in vitro modification of genomic DNA. To conduct this method, ribonucleoprotein (RNP) of purified prime editor fusion protein and a PEgRNA (i.e., the PE complex) is assembled that is configured to install an adapter or primer binding sequence at a target site, but is otherwise the same as the PEgRNA of interest. This RNP (i.e., PE complex) is incubated with extracted genomic DNA before or after fragmentation of the DNA. After fragmentation, different adapters sequences are ligated to the ends of the fragment DNA. PCR is used to amplify those genomic sites that span the inserted adapter sequence (i.e., inserted by EP) and the adapters ligated to fragment ends. High throughput sequencing between the adapters sequences can identify genomic sites of modification that are on-target and off-target. This in vitro editing method should enhance the sensitivity of detection because cellular DNA repair will not eliminate the reverse-transcribed DNA adapter added by the prime editor.

[0926] These methods could be used to identify off-target editing for any prime editor, or any genome editor that uses a guide RNA to recognize a target cut site (most Cas nucleases).

[0927] These methods could be applied to all genetic diseases for which genome editors are considered for use in treatment.

[0928] Exemplary adapter and/or primer binding sequences that may be installed by PE include, but are not limited to:

ADAPTER 1
(SEQ ID NO: 177)
5′-CGGTGGACCGATGATCT-3′
ADAPTER 2
(SEQ ID NO: 178)
5′-GCCACCTGGCTACTAGA-3′
ADAPTER 3
(SEQ ID NO: 179)
5′-AGATCATCGGTCCACCG-3′
ADAPTER 4
(SEQ ID NO: 180)
5′-TCTAGTAGCCAGGTGGC-3′

[0929] These adapter and/or primer binding sequences may also be used in the ligation step after genomic DNA fragmentation as outlined above.

[0930] Exemplary PEgRNA designs that illustrate the use of the herein described method to evaluate off-target editing, and their edit target locus, are as follows:

HEK3 TEST LOCUS OFF-TARGET DISCOVERY:
(SEQ ID NO: 181)
GGCCCAGACTGAGCACGTGAGTTTTAGAGCTAGAAATAGCAAGTTAAAAT
AAGGCTAGTCCGTTATCAACTTGAAAAAGTGGCACCGAGTCGGTGCTCTG
CCATCACGGTGGACCGATGATCTCGTGCTCAGTCTG
HEK4 TEST LOCUS OFF-TARGET DISCOVERY:
(SEQ ID NO: 182)
GGCACTGCGGCTGGAGGTGGGTTTTAGAGCTAGAAATAGCAAGTTAAAAT
AAGGCTAGTCCGTTATCAACTTGAAAAAGTGGCACCGAGTCGGTGCACAC
AGCACCAGAGTCTCCGCTTTAACCCCCAGCCACCTGGCTACTAGACCTCC
AGCC
SICKLE CELL CORRECTION OFF-TARGET DISCOVERY:
(SEQ ID NO: 183)
GCATGGTGCACCTGACTCCTGGTTTTAGAGCTAGAAATAGCAAGTTAAAA
TAAGGCTAGTCCGTTATCAACTTGAAAAAGTGGCACCGAGTCGGTGCAGA
CTTCTCTTCAGGCCACCTGGCTACTAGAGAGTCAGGTGCAC
KEY
PBS Spacer
sgRNA scaffold
DNA synthesis template
Adapter
PBS

[0931] K. Use of Prime Editing for Insertion of Inducible Dimerization Domains

[0932] The prime editors described herein may also be used to install dimerization domains into one or more protein targets. The dimerization domains may facilitate inducible regulation of the activity associated with the dimerization of the one or more protein targets via a linking moiety (e.g., a small molecule, peptide, or protein) that binds in a bi-specific manner. In various aspects, the dimerization domains, when installed on different proteins (e.g., the same type or different proteins), each bind to the same bi-specific moiety (e.g., a bi-specific small molecule, peptide, or polypeptide having a least two regions that separately bind to the dimerization domains), thereby causing the dimerization of the proteins through their common interaction to the bi-specific ligand. In this manner, the bi-specific ligand functions as an “inducer” of dimerization of two proteins. In some cases, the bi-specific ligand or compound will have two targeting moieties that are the same. In other embodiments, the bi-specific ligand or compound will have targeting moieties that are each different from the other. The bi-specific ligand or compound having the same two targeting moieties will be able to target the same dimerization domain installed on different protein targets. The bi-specific ligand or compound having different targeting moieties will be able to target different dimerization domains installed on different protein targets.

[0933] As used herein, the term “dimerization domain” refers to a ligand-binding domain that binds to a binding moiety of a bi-specific ligand. A “first” dimerization domain binds to a first binding moiety of a bi-specific ligand and a “second” dimerization domain binds to a second binding moiety of the same bi-specific ligand. When the first dimerization domain is fused to a first protein (e.g., via PE, as discussed herein) and the second dimerization domain (e.g., via PE, as discussed herein) is fused to a second protein, the first and second protein dimerize in the presence of a bi-specific ligand, wherein the bi-specific ligand has at least one moeity that binds to the first dimerization domain and at least another moiety that binds to the second dimerization domain.

[0934] The term “bi-specific ligand” or “bi-specific moiety,” as used herein, refers to a ligand that binds to two different ligand-binding domains. In various embodiments, the bi-specific moiety itself is a dimer of two of same or two different chemical moieties, wherein each moiety specifically and tightly binds to a dimerization domain. In certain embodiments, the ligand is a small molecule compound, or a peptide, or a polypeptide. In other embodiments, ligand-binding domain is a “dimerization domain,” which can be install as a peptide tag onto a protein. In various embodiments, two proteins each comprising the same or different dimerization domains can be induced to dimerize through the binding of each dimerization domain to the bi-specific ligand. These molecules may also be referred to as “chemical inducers of dimerization” or CIDs. In addition, the bi-specific ligands may be prepared by coupling (e.g., through standardize chemical linkages) two of the same moieties together, or two different moieties together, wherein each moiety tightly and specifically binds to a dimerization domain.

[0935] In various aspects, the dimerization domains installed by PE can be the same or different.

[0936] For example, the dimerization domains can be FKBP12, which has the following amino acid sequence:

FKBP12
(SEQ ID NO: 488)
MGVQVETISPGDGRTFPKRGQTCVVHYTGMLEDGKKFDSSRDRNKPFKFM
LGKQEVIRGWEEGVAQMSVGQRAKLTISPDYAYGATGHPGIIPPHATLVF
DVELLKLE

[0937] In another example, the dimerization domain can be a mutant of FKBP12 referred to as FKBP12-F36V, a mutant of FKBP12 with an engineered hole that binds a synthetic bumped FK506 mimic (2, FIG. 3)¹⁰⁷:

FKBP12-F36V
(SEQ ID NO: 489)
MGVQVETISPGDGRTFPKRGQTCVVHYTGMLEDGKKVDSSRDRNKPFKFM
LGKQEVIRGWEEGVAQMSVGQRAKLTISPDYAYGATGHPGIIPPHATLVF
DVELLKLE

[0938] In another example, the dimerization domain can be cyclophilin, as follows:

CYCLOPHILIN
(SEQ ID NO: 490)
MVNPTVFFDIAVDGEPLGRVSFELFADKVPKTAENFRALSTGEKGFGYKG
SCFHRIIPGFMCQGGDFTRHNGTGGKSIYGEKFEDENFILKHTGPGILSM
ANAGPNTNGSQFFICTAKTEWLDGKHVVFGKVKEGMNIVEAMERFGSRNG
KTSKKITIADCGQLE

[0939] In various embodiments, the amino acid sequences of these dimerization domains may be altered in order to optimize binding or to improve binding orthogonality to native targets. The nucleic acid sequences of the genes encoding small-molecule binding proteins may be altered in order to optimize the efficiency of the PE process, such as by reducing PEgRNA secondary structure.

[0940] Other examples of suitable dimerization domains and a cognate small molecule compound which binds thereto are provided as follows. Note that the cognate small molecule compound could be coupled (e.g., via a chemical linker) to a second small molecule compound (either the same compound or a different compound) in order to form a bi-specific ligand that may bind two dimerization domains. In some cases, such as FK506 and cyclosporin A, dimerization of each (e.g., FK506-FK506 or cyclosporin A-cyclosporin A) reduces or eliminates immunosuppressive activity of the monomeric compounds.

| SMALL MOLECULE-BINDS TO THE | |
|---|---|
| DIMERIZATION DOMAIN-A DIMER OF | |
| THESE MOLECULES WOULD CONSTITUTE A | |
| BI-SPECIFIC LIGAND THAT WOULD BIND | |
| TWO DIMERIZATION DOMAINS | DIMERIZATION DOMAIN(S) |
| [chemical structure] | AMINO ACID SEQUENCE OF FKBP12: MGVQVETISPGDGRTFPKRGQTCV VHYTGMLEDGKKFDSSRDRNKPFK FMLGKQEVIRGWEEGVAQMSVGQ RAKLTISPDYAYGATGHPGIIPPHAT LVFDVELLKLE (SEQ ID NO: 491) CALCINEURIN: |
| [chemical structure] | AMINO ACID SEQUENCE OF HUMAN CYCLOPHILIN A: MVNPTVFFDIAVDGEPLGRVSFELF ADKVPKTAENFRALSTGEKGFGYG GSCFHRIIPGFMCQGGDFTRHNGTG GKSIYGEKFEDENFILKHTGPGILSM ANAGPNTNGSQFFITAKTEWLDG KHVVFGKVKEGMNIVEAMERFGS RNGKTSKKITIADCGQLE (SEQ ID NO: 490) AMINO ACID SEQUENCE OF HUMAN CYCLOPHILIN B: MLRLSERNMKVLLAAALIAGSVFF LLLPGPSAADEKKKGPKVTVKVYF DLRIGDEDVGRVIFGLFGKTVPKTV DNFVALATGEKGFGYKNSKFHRVIK DFMIQGGDFTRGDGTGGKSIYGER FPDENFKLKHYGPGWVSMANGK DTNGSQFFITTVKTAWLDGKHVVF GKVLEGMEVVRKVESTKTDSRDKP LKDVIIADCGKIEVEKPFAIAKE (SEQ ID NO: 493) AMINO ACID SEQUENCE OF MURINE CYCLOPHILIN C: MSPGPRLLLPAVLCLGLGALVSSSG SSGVRKRGPSVTDKVFFDVRIGDK DVGRIVIGLFGNVVPKTVENFVALA TGEKGYGYKGSIFHRVIKDFMIQGG DFTARDGTGGMSIYGETFPDENFKL KHYGIGWVSMANAGPDTNGSQFFI |
| | TLTKPTWLDGKHVVFGKVLDGMT |
| | VVHSIELQATDGHDRPLTDCTIVNS |
| | GKIDVKTPFVVEVPDW (SEQ ID |
| | NO: 494) |
| [chemical structure] | AMINO ACID SEQUENCE OF FKBP12-F36V MGVQVETISPGDGRTFPKRGQTCV VHYTGMLEDGKKVDSSRDRNKPF KFMLGKQEVIRGWEEGVAQMSVG QRAKLT ISPDYAYGATGHPGIIPPHATLVFDV ELLKLE (SEQ ID NO: 495) |
| [chemical structure] | AMINO ACID SEQUENCE OF HUMAN DIHYDROFOLATE REDUCTASE MVGSLNCIVAVSQNMGIGKNGDLP WPPLRNEFRYFQRMTTTSSVEGKQ NLVIMGKKTWFSIPEKNRPLKGRIN LVLSRELKEPPQGAHFLSRSLDDAL KLTEQPELANKVDMVWIVGGSSVY KEAMNHPGHLKLFVTRIMQDFESD TFFPEIDLEKYKLLPEYPGVLSDVQ EEKGIKYKFEVYEKND (SEQ ID NO: 496) |
| [chemical structure] | AMINO ACID SEQUENCE FOR E. COLI DIHYDROFOLATE REDUCTASE MISLIAALAVDRVIGMENAMPWNL PADLAWFKRNTLNKPVIMGRHTWE SIGRPLPGRKNIILSSQPGTDDRVTW VKSVDEAIAACGDVPEIMVIGGGRV YEQFLPKAQKLYLTHIDAEVEGDTH FPDYEPDDWESVFSEFHDADAQNS HSYCFEILERR (SEQ ID NO: 497) |
| [chemical structure] | AMINO ACID SEQUENCE FOR HUMAN GLUCOCORTICOID RECEPTOR MDSKESLTPGREENPSSVLAWERGD VMDFYKTLRGGATVKVSASSPSLA VASQSDSKQRRLLVDFPKGSVSNA QQPDLSKAVSLSMGLYMGETETKV MGNDLGFPQQGQISLSSGETDLKLL EESIANLNRSTSVPENPKSSASTAVS AAPTEKEF PKTHSDVSSEQQHLKGQTGTNGGN VKLYTTDQSTFDILQDLEFSSGSPG KETNESPWRSDLLIDENCLLSPLAG EDDSFLLEGNSNEDCKPLILPDTKP KIKDNGDLVLSSPSNVTLPQVKTEK EDFIELCTPGVIKQEKLGTVYCQAS FPGANIIGNKMSAISVHGVSTSGGQ MYHYDMNTASLSQQQDQKPIFNVI PPIPVGSENWNRCQGSGDDNLTSLG |
| | TLNFPGRTVFSNGYSSPSMRPDVSS |
| | PPSSSSTATTGPPPKLCLVCSDEASG |
| | CHYGVLTCGSCKVFFKRAVEGQHN |
| | YLCAGRNDCIIDKIRRKNCPACRYR |
| | KCLQAGMNLEARKTKKKIKGIQQA |
| | TTGVSQETSENPGNKTIVPATLPQLT |
| | PTLVSLLEVIEPEVLYAGYDSSVPDS |
| | TWRIMTTLNMLGGRQVIAAVKWA |
| | KAIPGFRNLHLDDQMTLLQYSWMF |
| | LMAFALGWRSYRQSSANLLCFAPD |
| | LIINEQRMTLPCMYDQCKHMLYVS |
| | SELHRLQVSYEEYLCMKTLLLLSSV |
| | PKDGLKSQELFDEIRMTYIKELGKA |
| | IVKREGNSSQNWQRFYQLTKLLDS |
| | MHEVVENLLNYCFQTFLDKTMSIE |
| | FPEMLAEIITNQIPKYSNGNIKKLLF |
| | HQK (SEQ ID NO: 498) |
| [chemical structure] | AMINO ACID SEQUENCE OF FKPB12: MGVQVETISPGDGRTFPKRGQTCV VHYTGMLEDGKKFDSSRDRNKPFK FMLGKQEVIRGWEEGVAQMSVGQ RAKLTISPDYAYGATGHPGIIPPHAT LVFDVELLKLE (SEQ ID NO: 491) |

[0941] Other examples of naturally occurring bifunctional molecules and their dual target receptors are as follows. Prime editing may be used to install the dual target receptors into different proteins. Once the different proteins are modified by PE to contain a bifunctional molecule receptor, the bifunctional molecules may be introduced, thereby causing the dimerization of the proteins modified to comprise the different dimerization domains. Examples of pairings of (1) a biofunctional molecule and (2) their dual target receptors are as follows:

| | TARGET |
|---|---|
| | RECEPTORS |
| | OF THE |
| NATURALLY OCCURRING BIOFUNCTIONAL | BIOFUNCTIONAL |
| MOLECULES | MOLECULE |
| [chemical structure] | Target receptor 1: auxin receptor Target receptor 2: TIR1 E3 ligase |
| [chemical structure] | Target receptor 1: JAZ receptor Target receptor 2: Col1 E3 ligase |
| [chemical structure] | target receptor 1: GBF1 target receptor 2: GTPase Arf1p |
| [chemical structure] | target receptor 1: PYR receptor target receptor 2: phosphoprotein phosphatase 2C |
| [chemical structure] | target receptor 1: adenylyl cyclase monomers target receptor 2: adenylyl cyclase monomers |
| [chemical structure] | target receptor 1: 14-3-3 proteins target receptor 2: H⁺-ATPase |
| [chemical structure] | target receptor 1: FKBP12 target receptor 2: mTOR |
| [chemical structure] | target receptor 1: cyclophilin target receptor 2: IMP dehydrogenase 2 |
| [chemical structure] | target receptor 1: cyclophilin target receptor 2: calcineurin |

[0942] Examples of other bifunctional molecules that can be used with this aspect of prime editing are as follows:

[chemical structure]

[chemical structure]

[0943] Synstab A, paclitaxel, and discodermolide are microtubule stabilizers. Thus, these compounds could be used to dimerize proteins modified by PE to comprise microtubule proteins. GNE-0011, ARV-825, and dBET1 comprise a BRD4 binding motif and a CRBN binding motif. Thus, these compounds could be used to dimerize proteins modified by PE to comprise these targeting domains.

[0944] The PEgRNAs for installing dimerization domains may comprising the following structures (in reference to FIG. 3D):

5′-[spacer]-[gRNA core]-[extension arm]-3′, wherein the the extension arm comprises 5′-
[homology arm]-[edit template]-[primer binding site]-3′; or
5′-[extension arm]-[spacer]-[gRNA core]-3′, wherein the the extension arm comprises 5′-
[homology arm]-[edit template]-[primer binding site]-3′, and wherein with either configuration the
“edit template” comprises a nucleotide sequence of a dimerization domain.

[0945] In one example, the PEgRNA for insertion of the FKBP12 dimerization domain at the C-terminal end of human insulin receptor (spacer underlined, gRNA core plain, flap homology bold, FKBP12 insertion in italics, annealing region bold italics):

PEGRNA FOR INSTALLING FKBP12 IN HUMAN INSULIN
RECEPTOR
(SEQ ID NO: 499)
CACGGUAGGCACUGUUAGGAGUUUUAGAGCUAGAAAUAGCAAGUUAAAAU
AAGGCUAGUCCGUUAUCAACUUGAAAAAGUGGCACCGAGUCGGUGCUUGC
CUCGGUCCAAUCCUUCCGGAGUGCAGGUGGAAACCAUCUCCCCAGGAGAC
GGGCGCACCUUCCCCAAGCGCGGCCAGACCUGCGUGGUGCACUACACCGG
GAUGCUUGAAGAUGGAAAGAAAUUUGAUUCCUCCCGGGACAGAAACAAGC
CCUUUAAGUUUAUGCUAGGCAAGCAGGAGGUGAUCCGAGGCUGGGAAGAA
GGGGUUGCCCAGAUGAGUGUGGGUCAGAGAGCCAAACUGACUAUAUCUCC
AGAUUAUGCCUAUGGUGCCACUGGGCACCCAGGCAUCAUCCCACCACAUG
CCACUCUCGUCUUCGAUGUGGAGCUUCUAAAACUGGAA

[symbol]

[symbol]

[0946] In another example, the PEgRNA for insertion of the FKBP12 dimerization domain at the HEK3 locus (for optimization):

PEGRNA FOR INSTALLINGF KBP12 IN HEK3
(SEQ ID NO: 500)
GGCCCAGACTGAGCACGTGAGTTTTAGAGCTAGAAATAGCAAGTTAAAAT
AAGGCTAGTCCGTTATCAACTTGAAAAAGTGGCACCGAGTCGGTGCTGGA
GGAAGCAGGGCTTCCTTTCCTCTGCCATCATTCCAGTTTTAGAAGCTCCA
CATCGAAGACGAGAGTGGCATGTGGTGGGATGATGCCTGGGTGCCCAGTG
GCACCATAGGCATAATCTGGAGATATAGTCAGTTTGGCTCTCTGACCCAC
ACTCATCTGGGCAACCCCTTCTTCCCAGCCTCGGATCACCTCCTGCTTGC
CTAGCATAAACTTAAAGGGCTTGTTTCTGTCCCGGGAGGAATCAAATTTC
TTTCCATCTTCAAGCATCCCGGTGTAGTGCACCACGCAGGTCTGGCCGCG
CTTGGGGAAGGTGCGCCCGTCTCCTGGGGAGATGGTTTCCACCTGCACTC
CCGTGCTCAGTCTG

[0947] The target proteins for installing dimerization domains are not particularly limited; however, it is advantagous their dimerization (once modified by PE) in the presence of a bi-specific ligand produces some advantagous biological effect, e.g., a signaling pathway, decreased immunoresponsiveness, etc. In various aspects, the target proteins that are to be dimerized through the PE-dependent installation of dimerization domains can be the same protein or different proteins. Preferably, the proteins, when dimerized, trigger one or more downstream biological cascades, e.g., a signal transduction cascade, phorsphorylation, etc. Exemplary target proteins into which PE may be used to install dimerization domains, include, but are not limited to:

| MEMBRANDE- | | | | |
|---|---|---|---|---|
| BOUND | KINASE DOMAIN | CID | SIGNALING | |
| RECEPTOR | FUSED TO | EMPLOYED | CASCADE | REFERENCE |
| T-CELL | FKBP12 | FK1012 | T-CELL | SCIENCE 262, 1019-24 |
| RECEPTOR | | (FK506 | RECEPTOR | (1993) |
| | | DIMER) | SIGNALING | CHEM. BIOL. 1, 163-172 |
| | | | | (1994). |
| FAS RECEPTOR | MURINE | CYCLOSPORIN | FAS | CHEM. BIOL. 3, 731-738 |
| | CYCLOPHILIN C | A DIMER | PATHWAY | (1996). |
| | | | FOR | |
| | | | APOPTOSIS | |
| INSULIN | FKBP12 | FK1012 | INSULIN | CURR. BIOL. 8, 11-18 |
| RECEPTOR | | (FK506 | SIGNALING | (1998). |
| | | DIMER) | | |
| PLATELET- | FKBP12 | FK1012 | PDGF | CURR. BIOL. 8, 11-18 |
| DERIVED | | (FK506 | MESODERM | (1998). |
| GROWTH | | DIMER) | FORMATION | |
| FACTOR (PDGF) | | | SIGNALING | |
| BETA | | | | |
| ERYTHROPOIETIN | FKBP12 | FK1012 | EPORMEDIATED | PROC. NATL. ACAD. SCI. |
| RECEPTOR | | (FK506 | PROLIFERATIVE | 94, 3076-3081 (2002). |
| (EPOR) | | DIMER) | SIGNALING | |

[0948] In one aspect, prime editors described herein may be used to install sequences encoding dimerization domains into one or more genes encoding target proteins of interest in a living cell or patient. This may be referred to as the “prime editing—CID system,” wherein the CID is the bi-specific ligand that induced dimerization of target proteins, each fused to a dimerization domain installed by PE. This edit alone should have no physiological effect. Upon administration of a bi-specific ligand, which typically is a dimeric small molecule that can simultaneously bind to two dimerization domaina each of which is fused to a copy of the target protein, the bi-specific ligand causes dimerization of the targeted protein. This target protein dimerization event then induces a biological signaling event, such as erythropoiesis or insulin signaling. A new method to place dimerization-induced biological processes, such as receptor signaling, under control of a convenient small-molecule drug (i.e., the bi-specific ligand) by the genomic integration of genes encoding small-molecule binding proteins (i.e., the dimerization domains) with prime editing is described herein.

[0949] Protein dimerization is a ubiquitous biological process. Notably, homodimerization of many membrane-bound receptors is known to initiate signaling cascades, often with profound biological consequences. A number of small-molecule natural products approved for use as drugs act as chemical inducers of protein dimerization as part of their mechanism of action.⁹² For example, FK506 binds tightly to FKBP12, and the resulting small molecule—protein complex then binds the phosphatase calcineurin, thereby inhibiting a step in T cell receptor signaling.⁹³ Likewise, cyclosporin A induces dimerization of cyclophilin and calcineurin, and rapamycin induces dimerization of FKBP and mTOR.^{93,94}

[0950] In one embodiment, leveraging the selective, high-affinity binding of the FK506:FKBP12 and cyclosporin A:cyclophilin small molecule:protein binding interaction, synthetic chemical inducers of dimerization have also been developed. In an example, a small molecule comprised of two units of FK506, termed FK1012, was shown to effect signal transduction when the cytoplasmic domains of signaling receptors were tagged with FKBP12.⁹⁵ Chemical inducers of dimerization (CIDs) have since been used to control a number of signaling pathways.⁹⁶⁻¹⁰³

[0951] While useful tools for studying biological processes, one challenge facing synthetic CIDs for therapeutic applications is that introduction of the FKBP12- or cyclophilin—target protein chimeras into patients is challenging.

[0952] The present disclosure brings together two concepts to create a previously inaccessible therapeutic process. The first concept is prime editing, described herein, which allows for precise genome editing, including targeted insertions, in living cells. The second concept is chemical-induced dimerization, a powerful tool that has enabled small-molecule control over signaling and oligomerization processes in cell culture.

[0953] Specific cases in which chemical control over protein dimerization may have had a beneficial therapeutic effect have been identified.

[0954] The insulin receptor is a heterotetrameric transmembrane protein that responds to insulin binding to the extracellular domain by phosphorylation of the cytoplasmic kinase domain.¹⁰⁴ An engineered chimeric protein composed of a membrane-localization component, the C-terminal kinase domain of the insulin receptor, and three copies of FKBP12 responds to FK1012 and initiates the insulin response in cell culture.⁹⁹ Similarly, it is expected that the fusion of FKBP12 to the C-terminal end of the kinase domain of the native insulin receptor in patient cells should allow for FK1012-dependent phosphorylation and initiation of the insulin signaling cascade. This system could replace or complement insulin use in patients who cannot make insulin (e.g., type-1 diabetics), or who respond weakly to insulin (e.g., type-2 diabetics).

[0955] Additionally, erythropoietin stimulates erythrocyte proliferation by binding to the erythropoietin receptor (EpoR), either inducing dimerization or a conformational change in a preformed receptor dimer which results in activation of the Jak/STAT signaling cascade.¹⁰⁵ It has been demonstrated that FK1012-induced oligomerization of the membrane-anchored cytoplasmic domain of EpoR tagged with FKBP12 is sufficient to initiate the signaling Jak/STAT signaling cascade and promote cell proliferation.¹⁰⁶ It is anticipated that fusing FKBP12 to native EpoR by prime editing in patient cells will allow for FK1012-induced control over erythrocyte proliferation (erythropoiesis). This system could be used to trigger red blood cell growth in anemic patients. FK1012-inducible EpoR could also be employed as an in vivo selectable marker for blood cells that have undergone ex vivo engineering.

[0956] In principle, any receptor tyrosine kinase could be viable target for a prime editing—CID therapeutic. The table below includes a list of all receptor tyrosine kinases in the human genome.¹¹⁰

| | | | | PROT | |
|---|---|---|---|---|---|
| Family | Receptor | Synonyms | NT Accession | Accession | Chromosome |
| ALK | ALK | Ki1 | NM_004304 | NP_004295 | 2p23 |
| family | LTK | TYK1 | NM_002344 | NP_002335 | 15q15.1-q21.1 |
| AXL | AXL | UFO, Tyro7(r) Ark(m) | NM_001699 | NP_001690 | 19q13.1 |
| family | MER | MERTK, NYK, Eyk(ch) | NM_006343 | NP_006334 | 2q14.1 |
| | TYRO3 | RSE, SKY, BRT, DTK, TIF | NM_006293 | NP_006284 | 15q15.1-q21.1 |
| DDR | DDR1 | CAK, TRKE, NEP | NM_013993 | NP_001945 | 6p21.3 |
| family | | NTRK4, EDDR1, PTK3 | | | |
| | DDR2 | TKT, TYRO10, NTRKR3 | NM_006182 | NP_006173 | 1q21-q22 |
| EGFR | EGFR | ERBB, ERBB1 | NM_005228 | NP_005219 | 7p12 |
| family | ERBB2 | HER2, Neu(r), NGL | NM_004448 | NP_004439 | 17q11.2-q12 |
| | ERBB3 | HER3 | NM_001982 | NP_001973 | 12q13 |
| | ERBB4 | HER4 | NM_005235 | NP_005226 | 2q33.3-q34 |
| EPH family | EPHA1 | EPH, EPHT | NM_005232 | NP_005223 | 7q32-q36 |
| | EPHA2 | ECK, Sek(m), Myk2(m) | NM_004431 | NP_004422 | 1p34 |
| | EPHA3 | HEK, ETK1, Tyro4(r), | NM_005233 | NP_005224 | 3p11.2 |
| | | Mek4(m), Cek4(ch) | | | |
| | EPHA4 | HEK8, Tyrol(r), Sek1(m), | NM_004438 | NP_004429 | 2q36qter |
| | | Cek8(ch) | | | |
| | EPHA5 | HEK7, Ehk(r), Bsk(r), | L36644 | P54756 | |
| | | Cek7(ch) | | | |
| | EPHA6 | DKFZp434C1418, Ehk2(r) | AL133666 | | |
| | EPHA7 | HEK11, Mdk1(m), | NM_004440 | NP_004431 | 6q21 |
| | | Ebk(m), Ehk3(r), | | | |
| | | Cek11(ch) | | | |
| | EPHA8 | HEK3, KIAA1459, Eek(r), | AB040892 | CAB81612 | 1q23-q24 |
| | | Cek10(ch) | | | |
| | EPHB1 | NET, EPHT2, HEK6, | NM_004441 | NP_004432 | 3q21-q23 |
| | | Elk(r), Cek6(ch) | | | |
| | EPHB2 | HEK5, ERK, DRT, | AF025304 | AAB94602 | 1p36.1-p35 |
| | | EPHT3, Tyro5(r), Nuk(m), | | | |
| | | Sek3(m), Cek5(ch) | | | |
| | EPHB3 | HEK2, Tyro6, Mdk5(m), | NM_004443 | NP_004434 | 3q21-qter |
| | | Sek4(m) | | | |
| | EPHB4 | HTK, Tyro11(r), | NM_004444 | NP_004435 | |
| | | Mdk2(m), Myk1(m) | | | |
| | EPHB6 | HEP, Mep(m), Cek1(ch) | NM_004445 | NP_004436 | 7q33-q35 |
| FGFR | FGFR1 | FLT2, bFGFR, FLG, N-SAM | M34641 | AAA35835 | 8p11.2 |
| family | FGFR2 | KGFR, K-SAM, Bek(m), | NM_000141 | NP_000132 | 10q26 |
| | | CED1, JWS, Cek3(ch) | | | |
| | FGFR3 | HBGFR, ACH, Cek2(ch) | NM_000142 | NP_000133 | 4p16.3 |
| | FGFR4 | | NM_002011 | NP_002002 | 5q35.1-qter |
| INSR | IGF1R | JTK13 | NM_000875 | NP_000866 | 15q25-q26 |
| family | INSR | IR | NM_000208 | NP_000199 | 19p13.3-p13.2 |
| | INSRR | IRR | J05046 | AAC31759 | 1q21-q23 |
| MET | MET | HGFR | NM_000245 | NP_000236 | 7q31 |
| Family | RON | MST1R, CDw136, | NM_002447 | NP_002438 | 3p21.3 |
| | | Fv2(m), STK(m), SEA(ch) | | | |
| MUSK family | MUSK | Nsk2(m), Mlk1(m), Mk2(m) | NM_005592 | NP_005583 | 9q31.3-q32 |
| PDGFR | CSF1R | FMS, C-FMS, CD115 | NM_005211 | NP_005202 | 5q31-q32 |
| family | FLT3 | FLK2, STK1, CD135 | NM_004119 | NP_0041110 | 13q12 |
| | KIT | Sfr(m), CKIT | NM_000222 | NP_000213 | 4q11-q12 |
| | PDGFRA | | NM_006206 | NP_006197 | 4q11-q13 |
| | PDGFRB | PDGFR, JTK12 | NM_002609 | NP_002600 | 5q31-q32 |
| PTK7 family | PTK7 | CCK4, KLG(ch) | NM_002821 | NP_002812 | 6p21.2-p12.2 |
| RET family | RET | MEN2A/B, HSCR1, MTC1 | X12949 | P07949 | 10q11.2 |
| ROR | ROR1 | NTRKR1 | NM_005012 | NP_005003 | 1p32-p31 |
| family | ROR2 | NTRKR2 | NM_004560 | NP_004551 | |
| ROS family | ROS1 | MCF3 | NM_002944 | NP_002935 | 6q22 |
| RYK family | RYK | Vlk(m), Mrk(m) | S59184 | AAB263411 | 3q22 |
| TIE family | TEK | TIE2 | NM_000459 | NP_000450 | 9p21 |
| | TIE | TIE1, JTK14 | NM_005424 | NP_005415 | 1p34-p33 |
| TRK family | NTRK1 | TRK, TRKA | NM_002529 | NP_002520 | 1q21-q22 |
| | NTRK2 | TRKB | NM_006180 | NP_006171 | 9q22.1 |
| | NTRK3 | TRKC | NM_002530 | NP_002521 | 15q25 |
| VEGFR | VEGFR1 | FLT1 | NM_002019 | NP_002010 | 13q12 |
| family | VEGFR2 | KDR, FLK1 | | AAB88005 | 4q11-q12 |
| | VEGFR3 | FLT4, PCL | NM_002020 | NP_002011 | 5q34-q35 |
| AATYK | AATYK | AATK, KIAA0641 | NM_004920 | NP_004911 | 17q25.3 |
| family | AATYK2 | KIAA1079 | NM_014916 | NP_055731 | 7q21-q22 |
| | AATYK3 | | | | 19q13.2-ql3.3 |

[0957] There are numerous advantages to the prime editing—CID system. One such advantage is that it can replace endogenous ligands, which are typically proteins that pose complications in manufacturing, cost, delivery, production, or storage, with drug-like small-molecules that can be orally administered instead of administered by IV or injection, are readily prepared from FDA-approved drugs (or are themselves already drugs), and do not incur special production or storage costs typically associated with protein drugs. Another advantage is that the edit alone should have no physiological effect. The amount of target protein dimerization can be controlled by dosing the small-molecule CID. Further, target protein dimerization is readily and rapidly reversible by adding the monomeric form of the CID. Yet another advantage is that in instances where a single ligand targets multiple receptors, selectivity can be achieved by prime-editing only one receptor. Finally, depending on the delivery method used for prime editing, it may also be possible to restrict editing to a localized tissue or organ, allowing for inducible receptor activation only in specific areas.

[0958] If editing efficiencies are high enough with prime editing that two separate editing events could occur at high levels, it would also be possible to tag two proteins of interest with different small-molecule binding domains (such as FKBP and cyclophilin) and induce heterodimerizations with small molecule heterodimers (such as an FK506—cyclosporin A dimer).

[0959] The fusion of FKBP12 or other small-molecule binding proteins to native proteins has been accomplished, generally by overexpression from plasmid in tissue culture. Subsequent chemical-induced dimerization has been demonstrated to induce phenotypic changes to cells producing the fusion proteins.

[0960] The following references are cited above in the Section G and are incorporated herein by reference.
[0961] 1. Crabtree, G. R. & Schreiber, S. L. Three-part inventions: intracellular signaling and induced proximity. Trends Biochem. Sci. 21,418-22 (1996).
[0962] 2. Liu, J. et al. Calcineurin Is a Common Target of A and FKBP-FK506 Complexes. Cell 66, 807-815 (1991).
[0963] 3. Keith, C. T. et al. A mammalian protein targeted by G1-arresting rapamycin—receptor complex. Nature 369,756-758 (2003).
[0964] 4. Spencer, D. M., Wandless, T. J., Schreiber, S. L. S. & Crabtree, G. R. Controlling signal transduction with synthetic ligands. Science 262,1019-24 (1993).
[0965] 5. Pruschy, M. N. et al. Mechanistic studies of a signaling pathway activated by the organic dimerizer FK1012. Chem. Biol. 1,163-172 (1994).
[0966] 6. Spencer, D. M. et al. Functional analysis of Fas signaling in vivo using synthetic inducers of dimerization. Curr. Biol. 6,839-847 (1996).
[0967] 7. Belshaw, P. J., Spencer, D. M., Crabtree, G. R. & Schreiber, S. L. Controlling programmed cell death with a cyclophilin-cyclosporin-based chemical inducer of dimerization. Chem. Biol. 3, 731-738 (1996).
[0968] 8. Yang, J. X., Symes, K., Mercola, M. & Schreiber, S. L. Small-molecule control of insulin and PDGF receptor signaling and the role of membrane attachment. Curr. Biol. 8, 11-18 (1998).
[0969] 9. Belshaw, P. J., Ho, S. N., Crabtree, G. R. & Schreiber, S. L. Controlling protein association and subcellular localization with a synthetic ligand that induces heterodimerization of proteins. Proc. Natl. Acad. Sci. 93, 4604-4607 (2002).
[0970] 10. Stockwell, B. R. & Schreiber, S. L. Probing the role of homomeric and heteromeric receptor interactions in TGF-β signaling using small molecule dimerizers. Curr. Biol. 8, 761-773 (2004).
[0971] 11. Spencer, D. M., Graef, I., Austin, D. J., Schreiber, S. L. & Crabtree, G. R. A general strategy for producing conditional alleles of Src-like tyrosine kinases. Proc. Natl. Acad. Sci. 92, 9805-9809 (2006).
[0972] 12. Holsinger, L. J., Spencer, D. M., Austin, D. J., Schreiber, S. L. & Crabtree, G. R. Signal transduction in T lymphocytes using a conditional allele of Sos. Proc. Natl. Acad. Sci. 92, 9810-9814 (2006).
[0973] 13. Myers, M. G. Insulin Signal Transduction and the IRS Proteins. Annu. Rev. Pharmacol. Toxicol. 36, 615-658 (1996).
[0974] 14. Watowich, S. S. The erythropoietin receptor: Molecular structure and hematopoietic signaling pathways. J. Investig. Med. 59, 1067-1072 (2011).
[0975] 15. Blau, C. A., Peterson, K. R., Drachman, J. G. & Spencer, D. M. A proliferation switch for genetically modified cells. Proc. Natl. Acad. Sci. 94, 3076-3081 (2002).
[0976] 16. Clackson, T. et al. Redesigning an FKBP-ligand interface to generate chemical dimerizers with novel specificity. Proc. Natl. Acad. Sci. 95, 10437-10442 (1998).
[0977] 17. Diver, S. T. & Schreiber, S. L. Single-step synthesis of cell-permeable protein dimerizers that activate signal transduction and gene expression. J. Am. Chem. Soc. 119, 5106-5109 (1997).
[0978] 18. Guo, Z. F., Zhang, R. & Liang, F. Sen. Facile functionalization of FK506 for biological studies by the thiol-ene ‘click’ reaction. RSC Adv. 4, 11400-11403 (2014).
[0979] 19. Robinson, D. R., Wu, Y.-M. & Lin, S.-F. The protein tyrosine kinase family of the human genome. Oncogene 19, 5548-5557 (2000).

[0980] L. Use of Prime Editing for Cell Data Recording

[0981] The prime editors and the resulting genomic modifications can also be used to study and record cellular processes and development. For example, the prime editors described herein may be used to record the presence and duration of a stimulus to a cell by providing to the cell a first nucleic acid sequence that encodes a fusion protein with a nucleic acid programmable DNA binding protein (napDNAbp) and a reverse transcriptase, and providing the cell at least a second nucleic acid sequence that encodes a PEgRNA. Either the first, the second, or both nucleic acid sequences are operably linked to inducible promoters that are responsive to the cell stimulus such that it induces expression of the fusion protein and/or the PEgRNA thereby causing the modification of a target sequence within the cell.

[0982] The prime editors described herein can also be used for cellular barcoding and lineage tracing. For example, by barcoding each cell with a unique genomic barcode, the prime editor can help reveal the cell lineage map by allowing the construction of phylogenetic trees based on the modifications made in one or more target sequence. Starting from progenitor cells, the prime editor system can enable building a cell-fate map for single cells in a whole organism, which can be deciphered by analyzing the modifications made in one or more target sequence. The method for tracing the linage of cells can include providing a nucleic acid encoding a fusion protein with a napDNAbp and a reverse transcriptase, and providing at least one second nucleic acid encoding a PEgRNA. A unique cellular barcode can be generated using the fusion protein and the PEgRNA to create one or more modifications in one or more target sequence, thereby allowing the linage of any cell that arises from the first cell to be traced using the unique cellular barcode. The use of prime editors for both cell data recording and linage tracing is further described in Example 13.

[0983] The prime editors can do perform both lineage tracing and cellular signaling recording by modifying genomic target sequences or integrated pre-designed sequences. Prime editors use a synthetic fusion protein comprising a Cas9 nickase fragment (including but not limited to the SpCas9 H840A variant) and a reverse transcriptase domain, along with an engineered prime editing guide RNA (PEgRNA). Together, these components target a specific genomic sequence or integrated pre-designed sequence and install a pre-determined edit. Because the PEgRNA specifies both the target genomic sequence and the edited outcome, highly specific and controlled genome modification can be achieved simultaneously using multiple PEgRNA within the same cell. Accessible genome modifications include all single nucleotide substitutions, small- to medium-sized sequence insertions, and small- to medium-sized deletions. The versatility of this genome editing technology can enable temporally coupled, signal-specific recording within cells.

[0984] The use of prime editors for cell data recording can include compositions (e.g., nucleic acids), cells, systems, kits, and methods for recording the strength and/or duration of endogenous or exogenous stimuli over the course of a cell's lifetime. The cell data recording system can include a fusion protein consisting of a napDNAbp (e.g., a Cas9 domain) and a reverse transcriptase operably linked to a promoter that induces the expression of the fusion protein to induce changes by creating targeted and sequence-specified genomic insertions, deletions, or mutations in response to a stimulus or change in the cell. In contrast to digital memory devices that store information (e.g., the presence or absence of a stimulus) in one of two distinct states (i.e., “on” or “off”), these cell data recorders can induce permanent marks in cellular DNA in a manner that reflects both the strength (i.e., amplitude) and duration of one or more stimuli. Thus, in some aspects, cell data recording systems have the ability to simultaneously record multiple cell states, including, for example, exposure to a small molecule, a protein, a peptide, an amino acid, a metabolite, an inorganic molecule, an organometallic molecule, an organic molecule, a drug or drug candidate, a sugar, a lipid, a metal, a nucleic acid, a molecule produced during the activation of an endogenous or an exogenous signaling cascade, light, heat, sound, pressure, mechanical stress, shear stress, or a virus or other microorganism. These cell data recorders can employ sequencing technologies (e.g., high-throughput sequencing) to measure readout (e.g., changes in cellular DNA) and are not dependent on large cell populations for both the recording of a stimulus or the readout of the change(s) in cellular DNA induced by the stimulus.

[0985] In general, the cell data recorder systems provided herein for use in a cell comprise a fusion protein consisting of a napDNAbp and a reverse transcriptase, wherein the nucleic acid sequence encoding the fusion plasmid is operably linked to a promoter (e.g., an inducible promoter or a constitutive promoter). When a stimulus is present, or a change in cell state occurs, the stimulus induces the expression of the fusion protein. Also present within the cell are one or more nucleic acids encoding at least one PEgRNA that associate with the napDNAbp and directs the napDNAbp or the fusion protein to a target sequence (i.e., the PEgRNA is complementary to a target sequence). The nucleic acid encoding PEgRNA may also be, or may alternatively be, operably linked to a promoter (e.g., an inducible promoter or a constitutive promoter). Under the correct stimulus, or correct set of stimuli, both the fusion protein and the PEgRNA are expressed in the cell, and the PEgRNA associates with the fusion protein to direct it to a target sequence. This target sequence records the activity of the prime editor, thereby recording the presence of a stimulus, or a set of stimuli, or a change in cell state. More than one PEgRNA sequence can also be present in the cell, and these additional PEgRNA sequences, which can direct the fusion protein to distinct target sequences, can each be operably linked to a promoter that senses the presence of a different stimulus, allowing complex cell data recorder systems to be constructed for the ordered recording of the presence and duration of a stimulus, or set of stimuli. In some cases, one or more of the components of the cell data recorder system (e.g., fusion protein and PEgRNA) may be constitutively expressed in the cell. Exemplary components of the cell data recorder system for use with the compositions are described herein. Additional suitable combinations of components provided herein will be apparent to a person of ordinary skill in the art based on this disclosure and knowledge in the field, and thus are embraced by the scope of this disclosure.

[0986] Repeated modification of a DNA target that can be sequenced by targeted amplicon sequencing and/or RNA sequencing (which is particular value for single cell recording experiments) can be used to record a host of important biological processes, including activation of signaling cascades, metabolic states, and cellular differentiation programs. Connecting internal and external cellular signals to sequence modification in the genome is possible for any signal for which a signal responsive promotor exists. In some embodiments, the promoter is a promoter suitable for use in a prokaryotic system (i.e., a bacterial promoter). In some embodiments, the promoter is a promoter suitable for use in a eukaryotic system (i.e., a eukaryotic promoter). In some embodiments, the promoter is a promoter suitable for use in a mammalian (e.g., human) system (i.e., a mammalian promoter). In some embodiments, the promoter is induced by a stimulus (i.e., an inducible promoter). In some embodiments, the stimulus is a small molecule, a protein, a peptide, an amino acid, a metabolite, an inorganic molecule, an organometallic molecule, an organic molecule, a drug or drug candidate, a sugar, a lipid, a metal, a nucleic acid, a molecule produced during the activation of an endogenous or an exogenous signaling cascade, light, heat, sound, pressure, mechanical stress, shear stress, or a virus or other microorganism, change in pH, or change in oxidation/reduction state. In some embodiments, the stimulus is a light. In some embodiments, the stimulus is a virus. In some embodiments, the stimulus is a small molecule. In some embodiments, the stimulus is an antibiotic. In some embodiments, the stimulus is anhydrotetracycline or doxycycline. In some embodiments, the stimulus is a sugar. In some embodiments, the stimulus is arabinose, rhamnose, or IPTG. In some embodiments, the stimulus is a signaling molecule produced during an activated signaling cascade (e.g., beta-catenin produced during an activated Wnt signaling cascade). Additional promoters that detect signaling molecules can be generated to induce the expression of the nucleic acid sequence operably linked to the promoter, for example, promoters that record an endogenous pathway, including immune response (IL-2 promoter), a cAMP responsive element (CREB), NFκB signaling, interferon response, P53 (DNA damage), Sox2, TGF-β signaling (SMAD), Erk (e.g., from an activated Ras/Raf/Mek/Erk cascade), PI3K/AKT (e.g., from an activated Ras/PI3K/Akt cascade), heat shock, Notch signaling, Oct4, an aryl hydrocarbon receptor, or an AP-1 transcription factor. In some embodiments, the promoter is a constitutive promoter. In some embodiments, the promoter is a promoter listed in Table 3. Additional suitable promoters for use in both prokaryotic and eukaryotic systems will be apparent to those of ordinary skill in the art based on this disclosure and knowledge in the field, and are within the scope of the present disclosure.

[0987] Prime editors can also be used to trace cellular lineages. Repeated sequence modifications can be used to generate unique cellular barcodes to track individual cells. The arrays of barcodes, their order, and size can all be used to infer cellular lineages. For example, the insertion of homology sequences (i.e., sequences 3′ of the Cas9 nick location), and in particular homology sequences with associated barcodes, appear to be particularly useful lineage prime editor strategies. These systems can be designed such that successive rounds of editing result in the insertion of a barcode from a PEgRNA cassette that cannot be modified by other PEgRNA editing events in the same cell. The barcoding system can utilize multiple barcodes that can be associated with a given stimulus. This system can preserve the majority of the target protospacers but alter the seed sequence, PAM, and downstream adjacent nucleotides. This enables multiple signals to be connected to one editing locus without significant re-designing of the PEgRNAs being used. The strategy can enable multiplexed barcode insertions in response to a large number of cellular stimuli (either internal or external) at a single locus. It could enable the recording of intensity, duration, and order of as many signals as there exist unique barcodes (which can be designed with multiple N nucleotides to generate 4\hat{ }N possible barcodes, for example a 5-nt barcode would enable recording of 4\hat{ }5 or 1024 unique signals at once). This system can be used both in vitro and in vivo.

[0988] M. Use of Prime Editing to Modulate Biomolecule Activity

[0989] The use of prime editors described herein may also be used to regulate the subcellular localization and modification states of biomolecules, such as DNA, RNA, and proteins. Specific biological functions, like transcriptional control, cellular metabolism, and signal transduction cascades, are carefully orchestrated in particular locations within the cell. The ability to traffic proteins to these and other unique cellular compartments could provide an opportunity to alter a number of biological processes.

[0990] Accordingly, prime editing can be used to install genetically encoded handles that will allow for altered modification states and the subcellular trafficking of biomolecules with a genetically encoded signal (e.g. proteins, lipids, sugars, and nucleic acids). In various embodiments, the target biomolecules for prime editor-mediated medication are DNA. For example, DNA could be modified by installing a number of DNA sequences that change the accessibility of the target locus, which could lead to either increased or decreased transcription of desired sequences. In other embodiments, the target biomolecules for prime editor-mediated medication are RNA. For example, the activity of RNA can be modified by changing its cellular localization, interacting partners, structural dynamics, or thermodynamics of folding. In yet other embodiments, the target biomolecules for prime editor-mediated medication are protein. Proteins can be modified to impact post-translational modifications, protein motifs can be installed to change the subcellular localization of the protein, or proteins can be modified to either create or destroy their ability to exist within protein-protein complexation events.

[0991] This application of prime editing can be further described in Example 14.

### DNA Modifications

[0992] One target biomolecule for PE-mediated modification is DNA. Modifications to DNA could be made to install a number of DNA sequences that change the accessibility of the target locus. Chromatin accessibility controls gene transcriptional output. Installation of marks to recruit chromatin compacting enzymes should decrease the transcriptional output of neighboring genes, while installation of sequences associated with chromatin opening should make regions more accessible and in turn increase transcription. Installation of more complex sequence motifs that mirror native regulatory sequences should provide more nuanced and biologically sensitive control than the currently available dCas9 fusions to different epigenetic reader, writer, or eraser enzymes—tools that typically install large numbers of a single type of mark that may not have a particular biological antecedent. Installation of sequences that will bring two loci into close proximity, or bring loci into contact with the nuclear membrane, should also alter the transcriptional output of those loci as has been demonstrated in the burgeoning field of 3-D genomic architecture.

### RNA Modifications

[0993] Modifications to RNAs can also be made to alter their activity by changing their cellular localization, interacting partners, structural dynamics, or thermodynamics of folding. Installation of motifs that will cause translational pausing or frameshifting could change the abundance of mRNA species through various mRNA processing mechanisms. Modifying consensus splice sequences would also alter the abundance and prevalence of different RNA species. Changing the relative ratio of different splice isoforms would predictably lead to a change in the ratio of protein translation products, and this could be used to alter many biological pathways. For instance, shifting the balance of mitochondrial versus nuclear DNA repair proteins would alter the resilience of different cancers to chemotherapeutic reagents. Furthermore, RNAs could be modified with sequences that enable binding to novel protein targets. A number of RNA aptamers have been developed that bind with high affinity to cellular proteins. Installation of one of these aptamers could be used to either sequester different RNA species through binding to a protein target that will prevent their translation, biological activity, or to bring RNA species to specific subcellular compartments. Biomolecule degradation is another class of localization modification.

[0994] For example, RNA methylation is used to regulate RNAs within the cell. Consensus motifs for methylation could be introduced into target RNA coding sequences with PE. RNAs could also be modified to include sequences that direct nonsense mediated decay machinery or other nucleic acid metabolism pathways to degrade the target RNA species would change the pool of RNAs in a cell. Additionally, RNA species could be modified to alter their aggregation state. Sequences could be installed on single RNAs of interest or multiple RNAs to generate RNA tangles that would render them ineffective substrates for translation or signaling.

### Protein Modifications

[0995] Modifications to proteins via post-translational modification (PTM) also represent an important class of biomolecule manipulation that can be carried out with PE. As with RNA species, changing the abundance of proteins in a cell is an important capability of PE. Editing can be done to install stop codons in an open reading frame—this will eliminate full-length product from being produced by the edited DNA sequence. Alternatively, peptide motifs can be installed that cause the rate of protein degradation to be altered for a target protein. Installation of degradation tags into a gene body could be used to alter the abundance of a protein in a cell. Moreover, introduction of degrons that are induced by small molecules could enable temporal control over protein degradation. This could have important implications for both research and therapeutics as researchers could readily assess whether small molecule-mediated therapeutic protein degradation of a given target was a viable therapeutic strategy. Protein motifs could also be installed to change the subcellular localization of a protein. Amino acid motifs can be installed to preferentially traffic proteins to a number of subcellular compartments including the nucleus, mitochondria, cell membrane, peroxisome, lysosome, proteasome, exosome, and others.

[0996] Installing or destroying motifs modified by PTM machinery can alter protein post-translational modifications. Phosphorylation, ubiquitylation, glycosylation, lipidation (e.g. farnesylation, myristoylation, palmitoylation, prenylation, GPI anchors), hydroxylation, methylation, acetylation, crotonylation, SUMOylation, disulfide bond formations, side chain bond cleavage events, polypeptide backbone cleavage events (proteolysis), and a number of other protein PTMs have been identified. These PTMs change protein function, often by changing subcellular localization. Indeed, kinases often activate downstream signaling cascades via phosphorylation events. Removal of the target phosphosite would prevent signal transduction. The ability to site-specifically ablate or install any PTM motif while retaining full-length protein expression would be an important advance for both basic research and therapeutics. The sequence installation scope and target window of PE make it well suited for broad PTM modification space.

[0997] Removal of lipidation sites should prevent the trafficking of proteins to cell membranes. A major limitation to current therapeutics that target post-translational modification processes is their specificity. Farnesyl transferase inhibitors have been tested extensively for their ability to eliminate KRAS localization at cell membranes. Unfortunately, global inhibition of farnesylation comes with numerous off target effects that have prevented broad use of these small molecules. Similarly, specific inhibition of protein kinases with small molecules can be very challenging due to the large size of the human genome and similarities between various kinases. PE offers a potential solution to this specificity problem, as it enables inhibition of modification of the target protein by ablation of the modification site instead of global enzyme inhibition. For example, removal of the lapidated peptide motif in KRAS would be a targeted approach that could be used in place of farnesyl transferase inhibition. This approach is the functional inverse of inhibiting a target protein activity by installing a lipid-targeting motif on a protein not designed to be membrane bound.

[0998] PE can also be used to instigate protein-protein complexation events. Proteins often function within complexes to execute their biological activity. PE can be used to either create or destroy the ability of proteins to exist within these complexes. To eliminate complex formation events, amino acid substitutions or insertions along the protein: protein interface could be installed to disfavor complexation. SSX18 is a protein component of the BAF complex, an important histone-remodeling complex. Mutations in SSX18 drive synovial sarcomas. PE could be used to install side chains that prevent SSX18 from binding to its protein partners in the complex to prevent its oncogenic activity. PE could also be used to remove the pathogenic mutations to restore WT activity of this protein. Alternatively, PE could be used to keep proteins within either their native complex or to drag them to participate in interactions that are unrelated to their native activity to inhibit their activity. Forming complexes that maintain one interaction state over another could represent an important therapeutic modality. Altering protein: protein interfaces to decrease the Kd of the interaction would keep those proteins stuck to one another longer. As protein complexes can have multiple signaling complexes, like n-myc driving neuroblastoma signaling cascades in disease but otherwise participating in healthy transcriptional control in other cells. PE could be used to install mutations that drive n-myc association with healthy interactions partners and decrease its affinity for oncogenic interaction partners.

### REFERENCES CITED IN SECTION I

[0999] Each of the following references are incorporated herein by reference.
[1000] 1. Selective Target Protein Degradation via Phthalimide Conjugation. Winter et al. Science. Author manuscript; available in PMC 2016 Jul. 8.
[1001] 2. Reversible disruption of mSWIISNF (BAF) complexes by the SS18-SSX oncogenic fusion in synovial sarcoma. Kadoch and Crabtree. Cell. 2013 Mar. 28; 153(1):71-85. doi: 10.1016/j.cell.2013.02.036.
[1002] 3. Ribosomal frameshifting and transcriptional slippage: From genetic steganography and cryptography to adventitious use. Atkins et al. Nucleic Acids Research, Volume 44, Issue 15, 6 Sep. 2016, Pages 7007-7078.
[1003] 4. Transcriptional Regulation and its Misregulation in Disease. Lee and Young. Cell. Author manuscript; available in PMC 2014 Mar. 14.
[1004] 5. Protein localization in disease and therapy. Mien-Chie Hung, Wolfgang Link Journal of Cell Science 2011 124: 3381-3392.
[1005] 6. Loss of post-translational modification sites in disease. Li et al. Pac Symp Biocomput. 2010:337-47. PTMD: A Database of Human Disease-associated Post-translational Modifications. Xu et al. Genomics Proteomics Bioinformatics. 2018 August; 16(4):244-251. Epub 2018 Sep. 21.
[1006] 7. Post-transcriptional gene regulation by mRNA modifications. Zhao et al. Nature Reviews Molecular Cell Biology volume 18, pages 31-42 (2017).

[1007] N. Improved Design Aspects of PEgRNAs for Prime Editing

[1008] In other embodiments, the prime editing system may include the use of PEgRNA designs and strategies that can improve prime editing efficiency. These strategies seek to overcome some issues that exist because of the multi-step process required for prime editing. For example, unfavorable RNA structures that can form within the PEgRNA can result in the inhibition of DNA edits being copied from the PEgRNA into the genomic locus. These limitations could be overcome through the redesign and engineering of the PEgRNA component. These redesigns could improve prime editor efficiency, and could allow the installation of longer inserted sequences into the genome.

[1009] Accordingly, in various embodiments, the PEgRNA designs can result in longer PEgRNAs by enabling efficient expression of functional PEgRNAs from non-polymerase III (pol III) promoters, which would avoid the need for burdensome sequence requirements. In other embodiments, the core, Cas9-binding PEgRNA scaffold can be improved to improve efficacy of the system. In yet other embodiments, modifications can be made to the PEgRNA to improve reverse transcriptase (RT) processivity, which would enable the insertion of longer sequences at the targeted genomic loci. In other embodiments, RNA motifs can be added to the 5′ and/or 3′ termini of the PEgRNA to improve stability, enhance RT processivity, prevent misfolding of the PEgRNA, and/or recruit additional factors important for genome editing. In yet another embodiment, a platform is provided for the evolution of PEgRNAs for a given sequence target that could improve the PEgRNA scaffold and enhance prime editor efficiency. These designs could be used to improve any PEgRNA recognized by any Cas9 or evolved variant thereof.

[1010] This application of prime editing can be further described in Example 15.

[1011] The PEgRNAs may include additional design improvements that may modify the properties and/or characteristics of PEgRNAs thereby improving the efficacy of prime editing. In various embodiments, these improvements may belong to one or more of a number of different categories, including but not limited to: (1) designs to enable efficient expression of functional PEgRNAs from non-polymerase III (pol III) promoters, which would enable the expression of longer PEgRNAs without burdensome sequence requirements; (2) improvements to the core, Cas9-binding PEgRNA scaffold, which could improve efficacy; (3) modifications to the PEgRNA to improve RT processivity, enabling the insertion of longer sequences at targeted genomic loci; and (4) addition of RNA motifs to the 5′ or 3′ termini of the PEgRNA that improve PEgRNA stability, enhance RT processivity, prevent misfolding of the PEgRNA, or recruit additional factors important for genome editing.

[1012] In one embodiment, PEgRNA could be designed with polIII promoters to improve the expression of longer-length PEgRNA with larger extension arms. sgRNAs are typically expressed from the U6 snRNA promoter. This promoter recruits pol III to express the associated RNA and is useful for expression of short RNAs that are retained within the nucleus. However, pol III is not highly processive and is unable to express RNAs longer than a few hundred nucleotides in length at the levels required for efficient genome editing. Additionally, pol III can stall or terminate at stretches of U's, potentially limiting the sequence diversity that could be inserted using a PEgRNA. Other promoters that recruit polymerase II (such as pCMV) or polymerase I (such as the U1 snRNA promoter) have been examined for their ability to express longer sgRNAs. However, these promoters are typically partially transcribed, which would result in extra sequence 5′ of the spacer in the expressed PEgRNA, which has been shown to result in markedly reduced Cas9:sgRNA activity in a site-dependent manner. Additionally, while pol III-transcribed PEgRNAs can simply terminate in a run of 6-7 U's, PEgRNAs transcribed from pol II or pol I would require a different termination signal. Often such signals also result in polyadenylation, which would result in undesired transport of the PEgRNA from the nucleus. Similarly, RNAs expressed from pol II promoters such as pCMV are typically 5′-capped, also resulting in their nuclear export.

[1013] Previously, Rinn and coworkers screened a variety of expression platforms for the production of long-noncoding RNA-(lncRNA) tagged sgRNAs¹⁸³. These platforms include RNAs expressed from pCMV and that terminate in the ENE element from the MALAT1 ncRNA from humans¹⁸⁴, the PAN ENE element from KSHV¹⁸⁵, or the 3′ box from U1 snRNA¹⁸⁶. Notably, the MALAT1 ncRNA and PAN ENEs form triple helices protecting the polyA-tail ^{184,187} These constructs could also enhance RNA stability. It is contemplated that these expression systems will also enable the expression of longer PEgRNAs.

[1014] In addition, a series of methods have been designed for the cleavage of the portion of the pol II promoter that would be transcribed as part of the PEgRNA, adding either a self-cleaving ribozyme such as the hammerhead¹⁸⁸, pistol¹⁸⁹, hatchet¹⁸⁹, hairpin¹⁹⁰, VS¹⁹¹, twister¹⁹², or twister sister¹⁹² ribozymes, or other self-cleaving elements to process the transcribed guide, or a hairpin that is recognized by Csy4¹⁹³ and also leads to processing of the guide. Also, it is hypothesized that incorporation of multiple ENE motifs could lead to improved PEgRNA expression and stability, as previously demonstrated for the KSHV PAN RNA and element¹⁸⁵. It is also anticipated that circularizing the PEgRNA in the form of a circular intronic RNA (ciRNA) could also lead to enhanced RNA expression and stability, as well as nuclear localization¹⁹⁴.

[1015] In various embodiments, the PEgRNA may include various above elements, as exemplified by the following sequence.

Non-limiting example 1-PEgRNA expression platform
consisting of pCMV, Csy4 hairpin, the PEgRNA, and
MALAT1 ENE
(SEQ ID NO: 501)
TAGTTATTAATAGTAATCAATTACGGGGTCATTAGTTCATAGCCCATAT
ATGGAGTTCCGCGTTACATAACTTACGGTAAATGGCCCGCCTGGCTGAC
CGCCCAACGACCCCCGCCCATTGACGTCAATAATGACGTATGTTCCCAT
AGTAACGCCAATAGGGACTTTCCATTGACGTCAATGGGTGGAGTATTTA
CGGTAAACTGCCCACTTGGCAGTACATCAAGTGTATCATATGCCAAGTA
CGCCCCCTATTGACGTCAATGACGGTAAATGGCCCGCCTGGCATTATGC
CCAGTACATGACCTTATGGGACTTTCCTACTTGGCAGTACATCTACGTA
TTAGTCATCGCTATTACCATGGTGATGCGGTTTTGGCAGTACATCAATG
GGCGTGGATAGCGGTTTGACTCACGGGGATTTCCAAGTCTCCACCCCAT
TGACGTCAATGGGAGTTTGTTTTGGCACCAAAATCAACGGGACTTTCCA
AAATGTCGTAACAACTCCGCCCCATTGACGCAAATGGGCGGTAGGCGTG
TACGGTGGGAGGTCTATATAAGCAGAGCTGGTTTAGTGAACCGTCAGAT
CGTTCACTGCCGTATAGGCAGGGCCCAGACTGAGCACGTGAGTTTTAGA
GCTAGAAATAGCAAGTTAAAATAAGGCTAGTCCGTTATCAACTTGAAAA
AGTGGGACCGAGTCGGTCCTCTGCCATCAAAGCGTGCTCAGTCTGTTTT
AGGGTCATGAAGGTTTTTCTTTTCCTGAGAAAACAACACGTATTGTTTT
CTCAGGTTTTGCTTTTTGGCCTTTTTCTAGCTTAAAAAAAAAAAAAGCA
AAAGATGCTGGTGGTTGGCACTCCTGGTTTCCAGGACGGGGTTCAAATC
CCTGCGGCGTCTTTGCTTTGACT
Non-limiting example 2-PEgRNA expression platform
consisting of pCMV, Csy4 hairing, the PEgRNA, and
PAN ENE
(SEQ ID NO: 502)
TAGTTATTAATAGTAATCAATTACGGGGTCATTAGTTCATAGCCCATAT
ATGGAGTTCCGCGTTACATAACTTACGGTAAATGGCCCGCCTGGCTGAC
CGCCCAACGACCCCCGCCCATTGACGTCAATAATGACGTATGTTCCCAT
AGTAACGCCAATAGGGACTTTCCATTGACGTCAATGGGTGGAGTATTTA
CGGTAAACTGCCCACTTGGCAGTACATCAAGTGTATCATATGCCAAGTA
CGCCCCCTATTGACGTCAATGACGGTAAATGGCCCGCCTGGCATTATGC
CCAGTACATGACCTTATGGGACTTTCCTACTTGGCAGTACATCTACGTA
TTAGTCATCGCTATTACCATGGTGATGCGGTTTTGGCAGTACATCAATG
GGCGTGGATAGCGGTTTGACTCACGGGGATTTCCAAGTCTCCACCCCAT
TGACGTCAATGGGAGTTTGTTTTGGCACCAAAATCAACGGGACTTTCCA
AAATGTCGTAACAACTCCGCCCCATTGACGCAAATGGGCGGTAGGCGTG
TACGGTGGGAGGTCTATATAAGCAGAGCTGGTTTAGTGAACCGTCAGAT
CGTTCACTGCCGTATAGGCAGGGCCCAGACTGAGCACGTGAGTTTTAGA
GCTAGAAATAGCAAGTTAAAATAAGGCTAGTCCGTTATCAACTTGAAAA
AGTGGGACCGAGTCGGTCCTCTGCCATCAAAGCGTGCTCAGTCTGTTTT
GTTTTGGCTGGGTTTTTCCTTGTTCGCACCGGACACCTCCAGTGACCAG
ACGGCAAGGTTTTTATCCCAGTGTATATTGGAAAAACATGTTATACTTT
TGACAATTTAACGTGCCTAGAGCTCAAATTAAACTAATACCATAACGTA
ATGCAACTTACAACATAAATAAAGGTCAATGTTTAATCCATAAAAAAAA
AAAAAAAAAAA
Non-limiting example 3-PEgRNA expression platform
consisting of pCMV, Csy4 hairing, the PEgRNA, and
3xPAN ENE
(SEQ ID NO: 503)
TAGTTATTAATAGTAATCAATTACGGGGTCATTAGTTCATAGCCCATAT
ATGGAGTTCCGCGTTACATAACTTACGGTAAATGGCCCGCCTGGCTGAC
CGCCCAACGACCCCCGCCCATTGACGTCAATAATGACGTATGTTCCCAT
AGTAACGCCAATAGGGACTTTCCATTGACGTCAATGGGTGGAGTATTTA
CGGTAAACTGCCCACTTGGCAGTACATCAAGTGTATCATATGCCAAGTA
CGCCCCCTATTGACGTCAATGACGGTAAATGGCCCGCCTGGCATTATGC
CCAGTACATGACCTTATGGGACTTTCCTACTTGGCAGTACATCTACGTA
TTAGTCATCGCTATTACCATGGTGATGCGGTTTTGGCAGTACATCAATG
GGCGTGGATAGCGGTTTGACTCACGGGGATTTCCAAGTCTCCACCCCAT
TGACGTCAATGGGAGTTTGTTTTGGCACCAAAATCAACGGGACTTTCCA
AAATGTCGTAACAACTCCGCCCCATTGACGCAAATGGGCGGTAGGCGTG
TACGGTGGGAGGTCTATATAAGCAGAGCTGGTTTAGTGAACCGTCAGAT
CGTTCACTGCCGTATAGGCAGGGCCCAGACTGAGCACGTGAGTTTTAGA
GCTAGAAATAGCAAGTTAAAATAAGGCTAGTCCGTTATCAACTTGAAAA
AGTGGGACCGAGTCGGTCCTCTGCCATCAAAGCGTGCTCAGTCTGTTTT
GTTTTGGCTGGGTTTTTCCTTGTTCGCACCGGACACCTCCAGTGACCAG
ACGGCAAGGTTTTTATCCCAGTGTATATTGGAAAAACATGTTATACTTT
TGACAATTTAACGTGCCTAGAGCTCAAATTAAACTAATACCATAACGTA
ATGCAACTTACAACATAAATAAAGGTCAATGTTTAATCCATAAAAAAAA
AAAAAAAAAAAACACACTGTTTTGGCTGGGTTTTTCCTTGTTCGCACCG
GACACCTCCAGTGACCAGACGGCAAGGTTTTTATCCCAGTGTATATTGG
AAAAACATGTTATACTTTTGACAATTTAACGTGCCTAGAGCTCAAATTA
AACTAATACCATAACGTAATGCAACTTACAACATAAATAAAGGTCAATG
TTTAATCCATAAAAAAAAAAAAAAAAAAATCTCTCTGTTTTGGCTGGGT
TTTTCCTTGTTCGCACCGGACACCTCCAGTGACCAGACGGCAAGGTTTT
TATCCCAGTGTATATTGGAAAAACATGTTATACTTTTGACAATTTAACG
TGCCTAGAGCTCAAATTAAACTAATACCATAACGTAATGCAACTTACAA
CATAAATAAAGGTCAATGTTTAATCCATAAAAAAAAAAAAAAAAAAA
Non-limiting example 4-PEgRNA expression platform
consisting of pCMV, Csy4 hairing, the PEgRNA, and
3′ box
(SEQ ID NO: 504)
TAGTTATTAATAGTAATCAATTACGGGGTCATTAGTTCATAGCCCATAT
ATGGAGTTCCGCGTTACATAACTTACGGTAAATGGCCCGCCTGGCTGAC
CGCCCAACGACCCCCGCCCATTGACGTCAATAATGACGTATGTTCCCAT
AGTAACGCCAATAGGGACTTTCCATTGACGTCAATGGGTGGAGTATTTA
CGGTAAACTGCCCACTTGGCAGTACATCAAGTGTATCATATGCCAAGTA
CGCCCCCTATTGACGTCAATGACGGTAAATGGCCCGCCTGGCATTATGC
CCAGTACATGACCTTATGGGACTTTCCTACTTGGCAGTACATCTACGTA
TTAGTCATCGCTATTACCATGGTGATGCGGTTTTGGCAGTACATCAATG
GGCGTGGATAGCGGTTTGACTCACGGGGATTTCCAAGTCTCCACCCCAT
TGACGTCAATGGGAGTTTGTTTTGGCACCAAAATCAACGGGACTTTCCA
AAATGTCGTAACAACTCCGCCCCATTGACGCAAATGGGCGGTAGGCGTG
TACGGTGGGAGGTCTATATAAGCAGAGCTGGTTTAGTGAACCGTCAGAT
CGTTCACTGCCGTATAGGCAGGGCCCAGACTGAGCACGTGAGTTTTAGA
GCTAGAAATAGCAAGTTAAAATAAGGCTAGTCCGTTATCAACTTGAAAA
AGTGGGACCGAGTCGGTCCTCTGCCATCAAAGCGTGCTCAGTCTGTTTG
TTTCAAAAGTAGACTGTACGCTAAGGGTCATATCTTTTTTTGTTTGGTT
TGTGTCTTGGTTGGCGTCTTAAA
Non-limiting example 5-PEgRNA expression platform
consisting of pU1, Csy4 hairping, the PEgRNA, and
3′ box
(SEQ ID NO: 505)
CTAAGGACCAGCTTCTTTGGGAGAGAACAGACGCAGGGGCGGGAGGGAA
AAAGGGAGAGGCAGACGTCACTTCCCCTTGGCGGCTCTGGCAGCAGATT
GGTCGGTTGAGTGGCAGAAAGGCAGACGGGGACTGGGCAAGGCACTGTC
GGTGACATCACGGACAGGGCGACTTCTATGTAGATGAGGCAGCGCAGAG
GCTGCTGCTTCGCCACTTGCTGCTTCACCACGAAGGAGTTCCCGTGCCC
TGGGAGCGGGTTCAGGACCGCTGATCGGAAGTGAGAATCCCAGCTGTGT
GTCAGGGCTGGAAAGGGCTCGGGAGTGCGCGGGGCAAGTGACCGTGTGT
GTAAAGAGTGAGGCGTATGAGGCTGTGTCGGGGCAGAGGCCCAAGATCT
CAGTTCACTGCCGTATAGGCAGGGCCCAGACTGAGCACGTGAGTTTTAG
AGCTAGAAATAGCAAGTTAAAATAAGGCTAGTCCGTTATCAACTTGAAA
AAGTGGGACCGAGTCGGTCCTCTGCCATCAAAGCGTGCTCAGTCTGTTT
CAGCAAGTTCAGAGAAATCTGAACTTGCTGGATTTTTGGAGCAGGGAGA
TGGAATAGGAGCTTGCTCCGTCCACTCCACGCATCGACCTGGTATTGCA
GTACCTCCAGGAACGGTGCACCCACTTTCTGGAGTTTCAAAAGTAGACT
GTACGCTAAGGGTCATATCTTTTTTTGTTTGGTTTGTGTCTTGGTTGGC
GTCTTAAA

[1016] In various other embodiments, the PEgRNA may be improved by introducing improvements to the scaffold or core sequences. This can be done by introducing known

[1017] The core, Cas9-binding PEgRNA scaffold can likely be improved to enhance PE activity. Several such approaches have already been demonstrated. For instance, the first pairing element of the scaffold (P1) contains a GTTTT-AAAAC (SEQ ID NO: 3939) pairing element. Such runs of Ts have been shown to result in pol III pausing and premature termination of the RNA transcript. Rational mutation of one of the T-A pairs to a G-C pair in this portion of P1 has been shown to enhance sgRNA activity, suggesting this approach would also be feasible for PEgRNAs¹⁹⁵. Additionally, increasing the length of P1 has also been shown to enhance sgRNA folding and lead to improved activity¹⁹⁵, suggesting it as another avenue for the improvement of PEgRNA activity. Example improvements to the core can include:

PEgRNA containing a 6 nt extension to P1
(SEQ ID NO: 228)
GGCCCAGACTGAGCACGTGAGTTTTAGAGCTAGCTCATGAAAATGAGCT
AGCAAGTTAAAATAAGGCTAGTCCGTTATCAACTTGAAAAAGTGGGACC
GAGTCGGTCCTCTGCCATCAAAGCGTGCTCAGTCTGTTTTTTT
PEgRNA containing a T-A to G-C mutation within P1
(SEQ ID NO: 229)
GGCCCAGACTGAGCACGTGAGTTTGAGAGCTAGAAATAGCAAGTTTAAA
TAAGGCTAGTCCGTTATCAACTTGAAAAAGTGGGACCGAGTCGGTCCTC
TGCCATCAAAGCGTGCTCAGTCTGTTTTTTT

[1018] In various other embodiments, the PEgRNA may be improved by introducing modifications to the edit template region. As the size of the insertion templated by the PEgRNA increases, it is more likely to be degraded by endonucleases, undergo spontaneous hydrolysis, or fold into secondary structures unable to be reverse-transcribed by the RT or that disrupt folding of the PEgRNA scaffold and subsequent Cas9-RT binding. Accordingly, it is likely that modification to the template of the PEgRNA might be necessary to affect large insertions, such as the insertion of whole genes. Some strategies to do so include the incorporation of modified nucleotides within a synthetic or semi-synthetic PEgRNA that render the RNA more resistant to degradation or hydrolysis or less likely to adopt inhibitory secondary structures¹⁹⁶. Such modifications could include 8-aza-7-deazaguanosine, which would reduce RNA secondary structure in G-rich sequences; locked-nucleic acids (LNA) that reduce degradation and enhance certain kinds of RNA secondary structure; 2′-O-methyl, 2′-fluoro, or 2′-O-methoxyethoxy modifications that enhance RNA stability. Such modifications could also be included elsewhere in the PEgRNA to enhance stability and activity. Alternatively or additionally, the template of the PEgRNA could be designed such that it both encodes for a desired protein product and is also more likely to adopt simple secondary structures that are able to be unfolded by the RT. Such simple structures would act as a thermodynamic sink, making it less likely that more complicated structures that would prevent reverse transcription would occur. Finally, one could also split the template into two, separate PEgRNAs. In such a design, a PE would be used to initiate transcription and also recruit a separate template RNA to the targeted site via an RNA-binding protein fused to Cas9 or an RNA recognition element on the PEgRNA itself such as the MS2 aptamer. The RT could either directly bind to this separate template RNA, or initiate reverse transcription on the original PEgRNA before swapping to the second template. Such an approach could enable long insertions by both preventing misfolding of the PEgRNA upon addition of the long template and also by not requiring dissociation of Cas9 from the genome for long insertions to occur, which could possibly be inhibiting PE-based long insertions.

[1019] In still other embodiments, the PEgRNA may be improved by introducing additional RNA motifs at the 5′ and 3′ termini of the PEgRNAs. Several such motifs—such as the PAN ENE from KSHV and the ENE from MALAT1 were discussed above as possible means to terminate expression of longer PEgRNAs from non-pol III promoters. These elements form RNA triple helices that engulf the polyA tail, resulting in their being retained within the nucleus^{184,187}. However, by forming complex structures at the 3′ terminus of the PEgRNA that occlude the terminal nucleotide, these structures would also likely help prevent exonuclease-mediated degradation of PEgRNAs.

[1020] Other structural elements inserted at the 3′ terminus could also enhance RNA stability, albeit without enabling termination from non-pol III promoters. Such motifs could include hairpins or RNA quadruplexes that would occlude the 3′ terminus¹⁹⁷, or self-cleaving ribozymes such as HDV that would result in the formation of a 2′-3′-cyclic phosphate at the 3′ terminus and also potentially render the PEgRNA less likely to be degraded by exonucleases¹⁹⁸. Inducing the PEgRNA to cyclize via incomplete splicing—to form a ciRNA—could also increase PEgRNA stability and result in the PEgRNA being retained within the nucleus¹⁹⁴.

[1021] Additional RNA motifs could also improve RT processivity or enhance PEgRNA activity by enhancing RT binding to the DNA-RNA duplex. Addition of the native sequence bound by the RT in its cognate retroviral genome could enhance RT activity¹⁹⁹. This could include the native primer binding site (PBS), polypurine tract (PPT), or kissing loops involved in retroviral genome dimerization and initiation of transcription¹⁹⁹.

[1022] Addition of dimerization motifs—such as kissing loops or a GNRA tetraloop/tetraloop receptor pair²⁰⁰—at the 5′ and 3′ termini of the PEgRNA could also result in effective circularization of the PEgRNA, improving stability. Additionally, it is envisioned that addition of these motifs could enable the physical separation of the PEgRNA spacer and primer, prevention occlusion of the spacer which would hinder PE activity. Short 5′ or 3′ extensions to the PEgRNA that form a small toehold hairpin in the spacer region could also compete favorably against the annealing region of the PEgRNA binding the spacer. Finally, kissing loops could also be used to recruit other template RNAs to the genomic site and enable swapping of RT activity from one RNA to the other. Example improvements include, but are not limited to:

PEgRNA-HDV fusion
(SEQ ID NO: 230)
GGCCCAGACTGAGCACGTGAGTTTTAGAGCTAGAAATAGCAAGTTAAAA
TAAGGCTAGTCCGTTATCAACTTGAAAAAGTGGGACCGAGTCGGTCCTC
TGCCATCAAAGCGTGCTCAGTCTGGGCCGGCATGGTCCCAGCCTCCTCG
CTGGCGCCGGCTGGGCAACATGCTTCGGCATGGCGAATGGGACTTTTTT
T
PEgRNA-MMLV kissing loop
(SEQ ID NO: 231)
GGTGGGAGACGTCCCACCGGCCCAGACTGAGCACGTGAGTTTTAGAGCT
AGAAATAGCAAGTTAAAATAAGGCTAGTCCGTTATCAACTTGAAAAAGT
GGGACCGAGTCGGTCCTCTGCCATCAAAGCTTCGACCGTGCTCAGTCTG
GTGGGAGACGTCCCACCTTTTTTT
PEgRNA-VS ribozyme kissing loop
(SEQ ID NO: 232)
GAGCAGCATGGCGTCGCTGCTCACGGCCCAGACTGAGCACGTGAGTTTT
AGAGCTAGAAATAGCAAGTTAAAATAAGGCTAGTCCGTTATCAACTTGA
AAAAGTGGGACCGAGTCGGTCCTCTGCCATCAAAGCTTCGACCGTGCTC
AGTCTCCATCAGTTGACACCCTGAGGTTTTTTT
PEgRNA-GNRA tetraloop/tetraloop receptor
(SEQ ID NO: 233)
GCAGACCTAAGTGGUGACATATGGTCTGGGCCCAGACTGAGCACGTGAG
TTTTAGAGCTAUACGTAGCAAGTTAAAATAAGGCTAGTCCGTTATCAAC
TTUACGAAGTGGGACCGAGTCGGTCCTCTGCCATCAAAGCTTCGACCGT
GCTCAGTCTGCATGCGATTAGAAATAATCGCATGTTTTTTT
PEgRNA template switching secondary RNA-HDV
fusion
(SEQ ID NO: 234)
TCTGCCATCAAAGCTGCGACCGTGCTCAGTCTGGTGGGAGACGTCCCAC
CGGCCGGCATGGTCCCAGCCTCCTCGCTGGCGCCGGCTGGGCAACATGC
TTCGGCATGGCGAATGGGACTTTTTTT

[1023] PEgRNA scaffold could be further improved via directed evolution, in an analogous fashion to how SpCas9 and prime editor (PE) have been improved. Directed evolution could enhance PEgRNA recognition by Cas9 or evolved Cas9 variants. Additionally, it is likely that different PEgRNA scaffold sequences would be optimal at different genomic loci, either enhancing PE activity at the site in question, reducing off-target activities, or both. Finally, evolution of PEgRNA scaffolds to which other RNA motifs have been added would almost certainly improve the activity of the fused PEgRNA relative to the unevolved, fusion RNA. For instance, evolution of allosteric ribozymes composed of c-di-GMP-I aptamers and hammerhead ribozymes led to dramatically improved activity²⁰², suggesting that evolution would improve the activity of hammerhead-PEgRNA fusions as well. In addition, while Cas9 currently does not generally tolerate 5′ extension of the sgRNA, directed evolution will likely generate enabling mutations that mitigate this intolerance, allowing additional RNA motifs to be utilized.

[1024] The present disclosure contemplates any such ways to further improve the efficacy of the prime editing systems disclosed here.

[1025] O. Use of Prime Editing with Expanded Targeting Scope

[1026] Prime editing (PE) using Streptococcus pyogenes Cas9 (SpCas9) can efficiently install all single base substitutions, insertions, deletions, and combinations thereof at genomic loci where there is a suitably-placed NGG protospacer adjacent motif (PAM) that SpCas9 can efficiently bind. However, in another aspect the methods described herein broaden the targeting capability of PE by expanding the accessible PAMs and, therefore, the targetable genomic loci accessible for efficient PE. Prime editors using RNA-guided DNA binding proteins other than SpCas9 enable an expanded targettable scope of genomic loci by allowing access to different PAMs. In addition, use of RNA-guided DNA binding proteins smaller than SpCas9 also allows for more efficient viral delivery. PE with Cas proteins or other RNA-guided DNA binding proteins beyond SpCas9 will allow for high efficiency therapeutic edits that were either inaccessible or inefficient using SpCas9-based PE.

[1027] This is expected to be used in situations where SpCas9-based PE is either inefficient due to non-ideal spacing of an edit to relative to an NGG PAM or the overall size of the SpCas9-based construct is prohibitive for cellular expression and/or delivery. Specific disease-relevent loci such as the Huntingtin gene, which has few and poorly located NGG PAMs for SpCas9 near the target region, can easily be targeted using different Cas proteins in the PE system such as SpCas9-VRQR which recognizes an NGA PAM. Smaller Cas proteins will be used to generate smaller PE constructs that can be packaged into AAV vectors more efficiently, enabling better delivery to target tissues. FIG. 61 shows the reduction to practice of prime editing using Staphylococcus aureus CRISPR-Cas as the RNA-guided DNA binding protein. NT is untreated control.

[1028] FIGS. 62A-62B provide a demonstration of the importance of the protospacer for efficient installation of a desired edit at a precise location with prime editing. This highlights the importance of alternate PAMs and protospacers as novel features of this technology. “n.d.” in FIG. 62A is “not detected.”

[1029] FIG. 63 shows the reduction to practice of PE using SpCas9(H840A)-VRQR and SpCas9(H840A)-VRER as the RNA-guided DNA binding protein in a prime editor system. The SpCas9(H840A)-VRQR napDNAbp is disclosed herein as SEQ ID NO: 87. The SpCas9(H840A)-VRER napDNAbp is disclosed herein as SEQ ID NO: 88. The SpCas9(H840A)-VRER-MMLV RT fusion protein is disclosed herein as SEQ ID NO: 516, wherein the MMLV RT comprises the D200N, L603W, T330P, T306K, and W313F substitutions relative to the wild type MMLV RT. The SpCas9(H840A)-VRQR-MMLV RT fusion protein is disclosed herein as SEQ ID NO: 515, wherein the MMLV RT comprises the D200N, L603W, T330P, T306K, and W313F substitutions relative to the wild type MMLV RT. Seven different loci in the human genome are targeted: 4 with the SpCas9(H840A)-VRQR-MMLV RT prime editor system and 3 with the SpCas9(H840A)-VRER-MMLV RT system. The amino acid sequences of the tested contructs are as follows:

SACAS9-M-MLV RT PRIME EDITOR
(SEQ ID NO: 514)
MKRTADGSEFESPKKKRKVGKRNYILGLDIGITSVGYGIIDYETR
DVIDAGVRLFKEANVENNEGRRSKRGARRLKRRRRHRIQRVKK
LLFDYNLLTDHSELSGINPYEARVKGLSQKLSEEEFSAALLHLA
KRRGVHNVNEVEEDTGNELSTKEQISRNSKALEEKYVAELQLE
RLKKDGEVRGSINRFKTSDYVKEAKQLLKVQKAYHQLDQSFID
TYIDLLETRRTYYEGPGEGSPFGWKDIKEWYEMLMGHCTYFPE
ELRSVKYAYNADLYNALNDLNNLVITRDENEKLEYYEKFQIIEN
VFKQKKKPTLKQIAKEILVNEEDIKGYRVTSTGKPEFTNLKVYH
DIKDITARKEIIENAELLDQIAKILTIYQSSEDIQEELTNLNSELTQE
EIEQISNLKGYTGTHNLSLKAINLILDELWHTNDNQIAIFNRLKL
VPKKVDLSQQKEIPTTLVDDFILSPVVKRSFIQSIKVINAIIKKYG
LPNDIIIELAREKNSKDAQKMINEMQKRNRQTNERIEEIIRTTGK
ENAKYLIEKIKLHDMQEGKCLYSLEAIPLEDLLNNPFNYEVDHII
PRSVSFDNSFNNKVLVKQEEASKKGNRTPFQYLSSSDSKISYETF
KKHILNLAKGKGRISKTKKEYLLEERDINRFSVQKDFINRNLVD
TRYATRGLMNLLRSYFRVNNLDVKVKSINGGFTSFLRRKWKFK
KERNKGYKHHAEDALIIANADFIFKEWKKLDKAKKVMENQMF
EEKQAESMPEIETEQEYKEIFITPHQIKHIKDFKDYKYSHRVDKK
PNRELINDTLYSTRKDDKGNTLIVNNLNGLYDKDNDKLKKLIN
KSPEKLLMYHHDPQTYQKLKLIMEQYGDEKNPLYKYYEETGN
YLTKYSKKDNGPVIKKIKYYGNKLNAHLDITDDYPNSRNKVVK
LSLKPYRFDVYLDNGVYKFVTVKNLDVIKKENYYEVNSKCYE
EAKKLKKISNQAEFIASFYNNDLIKINGELYRVIGVNNDLLNRIE
VNMIDITYREYLENMNDKRPPRIIKTIASKTQSIKKYSTDILGNL
YEVKSKKHPQIIKKGSGGSSGGSSGSETPGTSESATPESSGGSSG
GSSTLNIEDEYRLHETSKEPDVSLGSTWLSDFPQAWAETGGMGL
AVRQAPLIIPLKATSTPVSIKQYPMSQEARLGIKPHIQRLLDQGIL
VPCQSPWNTPLLPVKKPGTNDYRPVQDLREVNKRVEDIHPTVP
NPYNLLSGLPPSHQWYTVLDLKDAFFCLRLHPTSQPLFAFEWR
DPEMGISGQLTWTRLPQGFKNSPTLFDEALHRDLADFRIQHPDL
ILLQYVDDLLLAATSELDCQQGTRALLQTLGNLGYRASAKKAQ
ICQKQVKYLGYLLKEGQRWLTEARKETVMGQPTPKTPRQLREF
LGTAGFCRLWIPGFAEMAAPLYPLTKTGTLFNWGPDQQKAYQEI
KQALLTAPALGLPDLTKPFELFVDEKQGYAKGVLTQKLGPWRR
PVAYLSKKLDPVAAGWPPCLRMVAAIAVLTKDAGKLTMGQPLVI
WYTDGSSLLQEGQRKAGAAVTTETEVIWAKALPAGTSAQRAEL
LAPHAVEALVKQPPDRWLSNARMTHYQALLLDTDRVQFGPVV
ALNPATLLPLPEEGLQHNCLDILAEAHGTRPDLTDQPLPDADHT
IALTQALKMAEGKKLNVYTDSRYAFATAHIHGEIYRRRGLLTSE
GKEIKNKDEILALLKALFLPKRLSIIHCPGHQKGHSAEARGNRM
ADQAARKAAITETPDTSTLLIENSSPSGGSKRTADGSEFEPKKKR
KV
SPCAS9(H840A)-VRQR-MALONEY MURINE LEUKEMIA VIRUS
REVERSE TRANSCRIPTASE PRIME EDITOR
(SEQ ID NO: 515)
MKRTADGSEFESPKKKRKVDKKYSIGLDIGTNSVGWAVITDEY
KVPSKKFKVLGNTDRHSIKKNLIGALLFDSGETAEATRLKRTAR
RRYTRRKNRICYLQEIFSNEMAKVDDSFFHRLEESFLVEEDKKH
ERHPIFGNIVDEVAYHEKYPTIYHLRKKLVDSTDKADLRLIYLAL
AHMIKFRGHFLIEGDLNPDNSDVDKLFIQLVQTYNQLFEENPIN
ASGVDAKAILSARLSKSRRLENLIAQLPGEKKNGLFGNLIALSL
GLTPNFKSNFDLAEDAKLQLSKDTYDDDLDNLLAQIGDQYADL
FLAAKNLSDAILLSDILRVNTEITKAPLSASMIKRYDEHHQDLTL
LKALVRQQLPEKYKEIFFDQSKNGYAGYIDGGASQEEFYKFIKPI
LEKMDGTEELLVKLNREDLLRKQRTFDNGSIPHQIHLGELHAIL
RRQEDFYPFLKDNREKIEKILTFRIPYYVGPLARGNSRFAWMTR
KSEETITPWNFEEVVDKGASAQSFIERMTNFDKNLPNEKVLPKH
SLLYEYFTVYNELTKVKYVTEGMRKPAFLSGEQKKAIVDLLFKT
NRKVTVKQLKEDYFKKIECFDSVEISGVEDRFNASLGTYHDLL
KIIKDKDFLDNEENEDILEDIVLTLTLFEDREMIEERLKTYAHLFD
DKVMKQLKRRRYTGWGRLSRKLINGIRDKQSGKTILDFLKSDG
FANRNFMQLIHDDSLTFKEDIQKAQVSGQGDSLHEHIANLAGSP
AIKKGILQTVKVVDELVKVMGRHKPENIVIEMARENQTTQKGQ
KNSRERMKRIEEGIKELGSQILKEHPVENTQLQNEKLYLYYLQN
GRDMYVDQELDINRLSDYDVDAIVPQSFLKDDSIDNKVLTRSD
KNRGKSDNVPSEEVVKKMKNYWRQLLNAKLITQRKFDNLTKA
ERGGLSELDKAGFIKRQLVETRQITKHVAQILDSRMNTKYDEND
KLIREVKVITLKSKLVSDFRKDFQFYKVREINNYHHAHDAYLNA
VVGTALIKKYPKLESEFVYGDYKVYDVRKMIAKSEQEIGKATA
KYFFYSNIMNFFKTEITLANGEIRKRPLIETNGETGEIVWDKGRD
FATVRKVLSMPQVNIVKKTEVQTGGFSKESILPKRNSDKLIARK
KDWDPKKYGGFVSPTVAYSVLVVAKVEKGKSKKLKSVKELLGI
TIMERSSFEKNPIDFLEAKGYKEVKKDLIIKLPKYSLFELENGRK
RMLASARELQKGNELALPSKYVNFLYLASHYEKLKGSPEDNEQ
KQLFVEQHKHYLDEIIEQISEFSKRVILADANLDKVLSAYNKHR
DKPIREQAENIIHLFTLTNLGAPAAFKYFDTTIDRKQYRSTKEVL
DATLIHQSITGLYETRIDLSQLGGDSGGSSGGSSGSETPGTSESAT
PESSGGSSGGSSTLNIEDEYRLHETSKEPDVSLGSTWLSDFPQA
WAETGGMGLAVRQAPLIIPLKATSTPVSIKQYPMSQEARLGIKP
HIQRLLDQGILVPCQSPWNTPLLPVKKPGTNDYRPVQDLREVN
KRVEDIHPTVPNPYNLLSGLPPSHQWYTVLDLKDAFFCLRLHPT
SQPLFAFEWRDPEMGISGQLTWTRLPQGFKNSPTLFNEALHRDL
ADFRIQHPDLILLQYVDDLLLAATSELDCQQGTRALLQTLGNLG
YRASAKKAQICQKQVKYLGYLLKEGQRWLTEARKETVMGQPT
PKTPRQLREFLGKAGFCRLFIPGFAEMAAPLYPLTKPGTLFNWG
PDQQKAYQEIKQALLTAPALGLPDLTKPFELFVDEKQGYAKGVL
TQKLGPWRRPVAYLSKKLDPVAAGWPPCLRMVAAIAVLTKDAG
KLTMGQPLVILAPHAVEALVKQPPDRWLSNARMTHYQALLLDT
DRVQFGPVVALNPATLLPLPEEGLQHNCLDILAEAHGTRPDLTD
QPLPDADHTWYTDGSSLLQEGQRKAGAAVTTETEVIWAKALPA
GTSAQRAELIALTQALKMAEGKKLNVYTDSRYAFATAHIHGEIY
RRRGWLTSEGKEIKNKDEILALLKALFLPKRLSIIHCPGHQKGHS
AEARGNRMADQAARKAAITETPDTSTLLIENSSPSGGSKRTADG
SEFEPKKKRKV
SPCAS9(H840A)-VRER-MALONEY MURINE LEUKEMIA VIRUS
REVERSE TRANSCRIPTASE PRIME EDITOR
(SEQ ID NO: 516)
MKRTADGSEFESPKKKRKVDKKYSIGLDIGTNSVGWAVITDEY
KVPSKKFKVLGNTDRHSIKKNLIGALLFDSGETAEATRLKRTAR
RRYTRRKNRICYLQEIFSNEMAKVDDSFFHRLEESFLVEEDKKH
ERHPIFGNIVDEVAYHEKYPTIYHLRKKLVDSTDKADLRLIYLAL
AHMIKFRGHFLIEGDLNPDNSDVDKLFIQLVQTYNQLFEENPIN
ASGVDAKAILSARLSKSRRLENLIAQLPGEKKNGLFGNLIALSL
GLTPNFKSNFDLAEDAKLQLSKDTYDDDLDNLLAQIGDQYADL
FLAAKNLSDAILLSDILRVNTEITKAPLSASMIKRYDEHHQDLTL
LKALVRQQLPEKYKEIFFDQSKNGYAGYIDGGASQEEFYKFIKPI
LEKMDGTEELLVKLNREDLLRKQRTFDNGSIPHQIHLGELHAIL
RRQEDFYPFLKDNREKIEKILTFRIPYYVGPLARGNSRFAWMTR
KSEETITPWNFEEVVDKGASAQSFIERMTNFDKNLPNEKVLPKH
SLLYEYFTVYNELTKVKYVTEGMRKPAFLSGEQKKAIVDLLFKT
NRKVTVKQLKEDYFKKIECFDSVEISGVEDRFNASLGTYHDLL
KIIKDKDFLDNEENEDILEDIVLTLTLFEDREMIEERLKTYAHLFD
DKVMKQLKRRRYTGWGRLSRKLINGIRDKQSGKTILDFLKSDG
FANRNFMQLIHDDSLTFKEDIQKAQVSGQGDSLHEHIANLAGSP
AIKKGILQTVKVVDELVKVMGRHKPENIVIEMARENQTTQKGQ
KNSRERMKRIEEGIKELGSQILKEHPVENTQLQNEKLYLYYLQN
GRDMYVDQELDINRLSDYDVDAIVPQSFLKDDSIDNKVLTRSD
KNRGKSDNVPSEEVVKKMKNYWRQLLNAKLITQRKFDNLTKA
ERGGLSELDKAGFIKRQLVETRQITKHVAQILDSRMNTKYDEND
KLIREVKVITLKSKLVSDFRKDFQFYKVREINNYHHAHDAYLNA
VVGTALIKKYPKLESEFVYGDYKVYDVRKMIAKSEQEIGKATA
KYFFYSNIMNFFKTEITLANGEIRKRPLIETNGETGEIVWDKGRD
FATVRKVLSMPQVNIVKKTEVQTGGFSKESILPKRNSDKLIARK
KDWDPKKYGGFVSPTVAYSVLVVAKVEKGKSKKLKSVKELLGI
TIMERSSFEKNPIDFLEAKGYKEVKKDLIIKLPKYSLFELENGRK
RMLASARELQKGNELALPSKYVNFLYLASHYEKLKGSPEDNEQ
KQLFVEQHKHYLDEIIEQISEFSKRVILADANLDKVLSAYNKHR
DKPIREQAENIIHLFTLTNLGAPAAFKYFDTTIDRKEYRSTKEVL
DATLIHQSITGLYETRIDLSQLGGDSGGSSGGSSGSETPGTSESAT
PESSGGSSGGSSTLNIEDEYRLHETSKEPDVSLGSTWLSDFPQA
WAETGGMGLAVRQAPLIIPLKATSTPVSIKQYPMSQEARLGIKP
HIQRLLDQGILVPCQSPWNTPLLPVKKPGTNDYRPVQDLREVN
KRVEDIHPTVPNPYNLLSGLPPSHQWYTVLDLKDAFFCLRLHPT
SQPLFAFEWRDPEMGISGQLTWTRLPQGFKNSPTLFNEALHRDL
ADFRIQHPDLILLQYVDDLLLAATSELDCQQGTRALLQTLGNLG
YRASAKKAQICQKQVKYLGYLLKEGQRWLTEARKETVMGQPT
PKTPRQLREFLGKAGFCRLFIPGFAEMAAPLYPLTKPGTLFNWG
PDQQKAYQEIKQALLTAPALGLPDLTKPFELFVDEKQGYAKGVL
TQKLGPWRRPVAYLSKKLDPVAAGWPPCLRMVAAIAVLTKDAG
KLTMGQPLVILAPHAVEALVKQPPDRWLSNARMTHYQALLLDT
DRVQFGPVVALNPATLLPLPEEGLQHNCLDILAEAHGTRPDLTD
QPLPDADHTWYTDGSSLLQEGQRKAGAAVTTETEVIWAKALPA
GTSAQRAELIALTQALKMAEGKKLNVYTDSRYAFATAHIHGEIY
RRRGWLTSEGKEIKNKDEILALLKALFLPKRLSIIHCPGHQKGHS
AEARGNRMADQAARKAAITETPDTSTLLIENSSPSGGSKRTADG
SEFEPKKKRKV

[1030] As shown in FIG. 63, the SpCas9(H840A)-VRQR-MMLV RT was operational at PAM sites that included “AGAG” and “GGAG”, with some editing activity at “GGAT” and “AGAT” PAM sequences. The SpCas9(H840A)-VRER-MMLV RT was operational at PAM sites that included “AGCG” and “GGCG”, with some editing activity at “TGCG.”

[1031] The data demonstrates that prime editing may be conducted using napDNAbps which bear different PAM specificities, such as those Cas9 variant described herein.

[1032] In various embodiments, the napDNAbp (e.g., Cas9) with altered PAM specificities comprise a combination of mutations that exhibit activity on a target sequence comprising a 5′-NAA-3′ PAM sequence at its 3′-end. In some embodiments, the combination of mutations are present in any one of the clones listed in Table 1. In some embodiments, the combination of mutations are conservative mutations of the clones listed in Table 1. In some embodiments, the Cas9 protein comprises the combination of mutations of any one of the Cas9 clones listed in Table 1.

TABLE 1
NAA PAM Clones
Mutations from wild-type SpCas9 (e.g., SEQ ID NO: 18)

D177N, K218R, D614N, D1135N, P1137S, E1219V, A1320V, A1323D, R1333K
D177N, K218R, D614N, D1135N, E1219V, Q1221H, H1264Y, A1320V, R1333K
A10T, I322V, S409I, E427G, G715C, D1135N, E1219V, Q1221H, H1264Y, A1320V,
R1333K
A367T, K710E, R1114G, D1135N, P1137S, E1219V, Q1221H, H1264Y, A1320V, R1333K
A10T, I322V, S409I, E427G, R753G, D861N, D1135N, K1188R, E1219V, Q1221H,
H1264H, A1320V, R1333K
A10T, I322V, S409I, E427G, R654L, V743I, R753G, M1021T, D1135N, D1180G, K1211R,
E1219V, Q1221H, H1264Y, A1320V, R1333K
A10T, I322V, S409I, E427G, V743I, R753G, E762G, D1135N, D1180G, K1211R, E1219V,
Q1221H, H1264Y, A1320V, R1333K
A10T, I322V, S409I, E427G, R753G, D1135N, D1180G, K1211R, E1219V, Q1221H,
H1264Y, S1274R, A1320V, R1333K
A10T, I322V, S409I, E427G, A589S, R753G, D1135N, E1219V, Q1221H, H1264H,
A1320V, R1333K
A10T, I322V, S409I, E427G, R753G, E757K, G865G, D1135N, E1219V, Q1221H, H1264Y,
A1320V, R1333K
A10T, I322V, S409I, E427G, R654L, R753G, E757K, D1135N, E1219V, Q1221H, H1264Y,
A1320V, R1333K
A10T, I322V, S409I, E427G, K599R, M631A, R654L, K673E, V743I, R753G, N758H,
E762G, D1135N, D1180G, E1219V, Q1221H, Q1256R, H1264Y, A1320V, A1323D,
R1333K
A10T, I322V, S409I, E427G, R654L, K673E, V743I, R753G, E762G, N869S, N1054D,
R1114G, D1135N, D1180G, E1219V, Q1221H, H1264Y, A1320V, A1323D, R1333K
A10T, I322V, S409I, E427G, R654L, L727I, V743I, R753G, E762G, R859S, N946D,
F1134L, D1135N, D1180G, E1219V, Q1221H, H1264Y, N1317T, A1320V, A1323D,
R1333K
A10T, I322V, S409I, E427G, R654L, K673E, V743I, R753G, E762G, N803S, N869S,
Y1016D, G1077D, R1114G, F1134L, D1135N, D1180G, E1219V, Q1221H, H1264Y,
V1290G, L1318S, A1320V, A1323D, R1333K
A10T, I322V, S409I, E427G, R654L, K673E, V743I, R753G, E762G, N803S, N869S,
Y1016D, G1077D, R1114G, F1134L, D1135N, K1151E, D1180G, E1219V, Q1221H,
H1264Y, V1290G, L1318S, A1320V, R1333K
A10T, I322V, S409I, E427G, R654L, K673E, V743I, R753G, E762G, N803S, N869S,
Y1016D, G1077D, R1114G, F1134L, D1135N, D1180G, E1219V, Q1221H, H1264Y,
V1290G, L1318S, A1320V, A1323D, R1333K
A10T, I322V, S409I, E427G, R654L, K673E, F693L, V743I, R753G, E762G, N803S, N869S,
L921P, Y1016D, G1077D, F1080S, R1114G, D1135N, D1180G, E1219V, Q1221H, H1264Y,
L1318S, A1320V, A1323D, R1333K
A10T, I322V, S409I, E427G, E630K, R654L, K673E, V743I, R753G, E762G, Q768H,
N803S, N869S, Y1016D, G1077D, R1114G, F1134L, D1135N, D1180G, E1219V, Q1221H,
H1264Y, L1318S, A1320V, R1333K
A10T, I322V, S409I, E427G, R654L, K673E, F693L, V743I, R753G, E762G, Q768H,
N803S, N869S, Y1016D, G1077D, R1114G, F1134L, D1135N, D1180G, E1219V, Q1221H,
G1223S, H1264Y, L1318S, A1320V, R1333K
A10T, I322V, S409I, E427G, R654L, K673E, F693L, V743I, R753G, E762G, N803S, N869S,
L921P, Y1016D, G1077D, F1801S, R1114G, D1135N, D1180G, E1219V, Q1221H, H1264Y,
L1318S, A1320V, A1323D, R1333K
A10T, I322V, S409I, E427G, R654L, V743I, R753G, M1021T, D1135N, D1180G, K1211R,
E1219V, Q1221H, H1264Y, A1320V, R1333K
A10T, I322V, S409I, E427G, R654L, K673E, V743I, R753G, E762G, M673I, N803S, N869S,
G1077D, R1114G, D1135N, V1139A, D1180G, E1219V, Q1221H, A1320V, R1333K
A10T, I322V, S409I, E427G, R654L, K673E, V743I, R753G, E762G, N803S, N869S,
R1114G, D1135N, E1219V, Q1221H, A1320V, R1333K

[1033] In some embodiments, the Cas9 protein comprises an amino acid sequence that is at least 80% identical to the amino acid sequence of a Cas9 protein as provided by any one of the variants of Table 1. In some embodiments, the Cas9 protein comprises an amino acid sequence that is at least 85%, at least 90%, at least 92%, at least 95%, at least 96%, at least 97%, at least 98%, at least 99%, or at least 99.5% identical to the amino acid sequence of a Cas9 protein as provided by any one of the variants of Table 1.

[1034] In some embodiments, the Cas9 protein exhibits an increased activity on a target sequence that does not comprise the canonical PAM (5′-NGG-3′) at its 3′ end as compared to Streptococcus pyogenes Cas9 as provided by SEQ ID NO: 18. In some embodiments, the Cas9 protein exhibits an activity on a target sequence having a 3′ end that is not directly adjacent to the canonical PAM sequence (5′-NGG-3′) that is at least 5-fold increased as compared to the activity of Streptococcus pyogenes Cas9 as provided by SEQ ID NO: 18 on the same target sequence. In some embodiments, the Cas9 protein exhibits an activity on a target sequence that is not directly adjacent to the canonical PAM sequence (5′-NGG-3′) that is at least 10-fold, at least 50-fold, at least 100-fold, at least 500-fold, at least 1,000-fold, at least 5,000-fold, at least 10,000-fold, at least 50,000-fold, at least 100,000-fold, at least 500,000-fold, or at least 1,000,000-fold increased as compared to the activity of Streptococcus pyogenes as provided by SEQ ID NO: 18 on the same target sequence. In some embodiments, the 3′ end of the target sequence is directly adjacent to an AAA, GAA, CAA, or TAA sequence. In some embodiments, the Cas9 protein comprises a combination of mutations that exhibit activity on a target sequence comprising a 5′-NAC-3′ PAM sequence at its 3′-end. In some embodiments, the combination of mutations are present in any one of the clones listed in Table 2. In some embodiments, the combination of mutations are conservative mutations of the clones listed in Table 2. In some embodiments, the Cas9 protein comprises the combination of mutations of any one of the Cas9 clones listed in Table 2.

TABLE 2
NAC PAM Clones
MUTATIONS FROM WILD-TYPE SPCAS9 (E.G., SEQ ID NO: 18)

T472I, R753G, K890E, D1332N, R1335Q, T1337N
I1057S, D1135N, P1301S, R1335Q, T1337N
T472I, R753G, D1332N, R1335Q, T1337N
D1135N, E1219V, D1332N, R1335Q, T1337N
T472I, R753G, K890E, D1332N, R1335Q, T1337N
I1057S, D1135N, P1301S, R1335Q, T1337N
T472I, R753G, D1332N, R1335Q, T1337N
T472I, R753G, Q771H, D1332N, R1335Q, T1337N
E627K, T638P, K652T, R753G, N803S, K959N, R1114G, D1135N, E1219V, D1332N,
R1335Q, T1337N
E627K, T638P, K652T, R753G, N803S, K959N, R1114G, D1135N, K1156E, E1219V,
D1332N, R1335Q, T1337N
E627K, T638P, V647I, R753G, N803S, K959N, G1030R, I1055E, R1114G, D1135N, E1219V,
D1332N, R1335Q, T1337N
E627K, E630G, T638P, V647A, G687R, N767D, N803S, K959N, R1114G, D1135N, E1219V,
D1332G, R1335Q, T1337N
E627K, T638P, R753G, N803S, K959N, R1114G, D1135N, E1219V, N1266H, D1332N,
R1335Q, T1337N
E627K, T638P, R753G, N803S, K959N, I1057T, R1114G, D1135N, E1219V, D1332N,
R1335Q, T1337N
E627K, T638P, R753G, N803S, K959N, R1114G, D1135N, E1219V, D1332N, R1335Q,
T1337N
E627K, M631I, T638P, R753G, N803S, K959N, Y1036H, R1114G, D1135N, E1219V,
D1251G, D1332G, R1335Q, T1337N
E627K, T638P, R753G, N803S, V875I, K959N, Y1016C, R1114G, D1135N, E1219V,
D1251G, D1332G, R1335Q, T1337N, I1348V
K608R, E627K, T638P, V647I, R654L, R753G, N803S, T804A, K848N, V922A, K959N,
R1114G, D1135N, E1219V, D1332N, R1335Q, T1337N
K608R, E627K, T638P, V647I, R753G, N803S, V922A, K959N, K1014N, V1015A, R1114G,
D1135N, K1156N, E1219V, N1252D, D1332N, R1335Q, T1337N
K608R, E627K, R629G, T638P, V647I, A711T, R753G, K775R, K789E, N803S, K959N,
V1015A, Y1036H, R1114G, D1135N, E1219V, N1286H, D1332N, R1335Q, T1337N
K608R, E627K, T638P, V647I, T740A, R753G, N803S, K948E, K959N, Y1016S, R1114G,
D1135N, E1219V, N1286H, D1332N, R1335Q, T1337N
K608R, E627K, T638P, V647I, T740A, N803S, K948E, K959N, Y1016S, R1114G, D1135N,
E1219V, N1286H, D1332N, R1335Q, T1337N
I670S, K608R, E627K, E630G, T638P, V647I, R653K, R753G, I795L, K797N, N803S,
K866R, K890N, K959N, Y1016C, R1114G, D1135N, E1219V, D1332N, R1335Q, T1337N
K608R, E627K, T638P, V647I, T740A, G752R, R753G, K797N, N803S, K948E, K959N,
V1015A, Y1016S, R1114G, D1135N, E1219V, N1266H, D1332N, R1335Q, T1337N
I570T, A589V, K608R, E627K, T638P, V647I, R654L, Q716R, R753G, N803S, K948E,
K959N, Y1016S, R1114G, D1135N, E1207G, E1219V, N1234D, D1332N, R1335Q, T1337N
K608R, E627K, R629G, T638P, V647I, R654L, Q740R, R753G, N803S, K959N, N990S,
T995S, V1015A, Y1036D, R1114G, D1135N, E1207G, E1219V, N1234D, N1266H, D1332N,
R1335Q, T1337N
I562F, V565D, I570T, K608R, L625S, E627K, T638P, V647I, R654I, G752R, R753G, N803S,
N808D, K959N, M1021L, R1114G, D1135N, N1177S, N1234D, D1332N, R1335Q, T1337N
I562F, I570T, K608R, E627K, T638P, V647I, R753G, E790A, N803S, K959N, V1015A,
Y1036H, R1114G, D1135N, D1180E, A1184T, E1219V, D1332N, R1335Q, T1337N
I570T, K608R, E627K, T638P, V647I, R654H, R753G, E790A, N803S, K959N, V1015A,
R1114G, D1127A, D1135N, E1219V, D1332N, R1335Q, T1337N
I570T, K608R, L625S, E627K, T638P, V647I, R654I, T703P, R753G, N803S, N808D, K959N,
M1021L, R1114G, D1135N, E1219V, D1332N, R1335Q, T1337N
I570S, K608R, E627K, E630G, T638P, V647I, R653K, R753G, I795L, N803S, K866R,
K890N, K959N, Y1016C, R1114G, D1135N, E1219V, D1332N, R1335Q, T1337N
I570T, K608R, E627K, T638P, V647I, R654H, R753G, E790A, N803S, K959N, V1016A,
R1114G, D1135N, E1219V, K1246E, D1332N, R1335Q, T1337N
K608R, E627K, T638P, V647I, R654L, K673E, R753G, E790A, N803S, K948E, K959N,
R1114G, D1127G, D1135N, D1180E, E1219V, N1286H, D1332N, R1335Q, T1337N
K608R, L625S, E627K, T638P, V647I, R654I, I670T, R753G, N803S, N808D, K959N,
M1021L, R1114G, D1135N, E1219V, N1286H, D1332N, R1335Q, T1337N
E627K, M631V, T638P, V647I, K710E, R753G, N803S, N808D, K948E, M1021L, R1114G,
D1135N, E1219V, D1332N, R1335Q, T1337N, S1338T, H1349R

[1035] In some embodiments, the Cas9 protein comprises an amino acid sequence that is at least 80% identical to the amino acid sequence of a Cas9 protein as provided by any one of the variants of Table 2. In some embodiments, the Cas9 protein comprises an amino acid sequence that is at least 85%, at least 90%, at least 92%, at least 95%, at least 96%, at least 97%, at least 98%, at least 99%, or at least 99.5% identical to the amino acid sequence of a Cas9 protein as provided by any one of the variants of Table 2.

[1036] In some embodiments, the Cas9 protein exhibits an increased activity on a target sequence that does not comprise the canonical PAM (5′-NGG-3′) at its 3′ end as compared to Streptococcus pyogenes Cas9 as provided by SEQ ID NO: 18. In some embodiments, the Cas9 protein exhibits an activity on a target sequence having a 3′ end that is not directly adjacent to the canonical PAM sequence (5′-NGG-3′) that is at least 5-fold increased as compared to the activity of Streptococcus pyogenes Cas9 as provided by SEQ ID NO: 18 on the same target sequence. In some embodiments, the Cas9 protein exhibits an activity on a target sequence that is not directly adjacent to the canonical PAM sequence (5′-NGG-3′) that is at least 10-fold, at least 50-fold, at least 100-fold, at least 500-fold, at least 1,000-fold, at least 5,000-fold, at least 10,000-fold, at least 50,000-fold, at least 100,000-fold, at least 500,000-fold, or at least 1,000,000-fold increased as compared to the activity of Streptococcus pyogenes as provided by SEQ ID NO: 18 on the same target sequence. In some embodiments, the 3′ end of the target sequence is directly adjacent to an AAC, GAC, CAC, or TAC sequence.

[1037] In some embodiments, the Cas9 protein comprises a combination of mutations that exhibit activity on a target sequence comprising a 5′-NAT-3′ PAM sequence at its 3′-end. In some embodiments, the combination of mutations are present in any one of the clones listed in Table 3. In some embodiments, the combination of mutations are conservative mutations of the clones listed in Table 3. In some embodiments, the Cas9 protein comprises the combination of mutations of any one of the Cas9 clones listed in Table 3.

TABLE 3
NAT PAM Clones
MUTATIONS FROM WILD-TYPE SPCAS9 (E.G., SEQ ID NO: 18)

K961E, H985Y, D1135N, K1191N, E1219V, Q1221H, A1320A, P1321S, R1335L
D1135N, G1218S, E1219V, Q1221H, P1249S, P1321S, D1322G, R1335L
V743I, R753G, E790A, D1135N, G1218S, E1219V, Q1221H, A1227V, P1249S, N1286K,
A1293T, P1321S, D1322G, R1335L, T1339I
F575S, M631L, R654L, V748I, V743I, R753G, D853E, V922A, R1114G D1135N, G1218S,
E1219V, Q1221H, A1227V, P1249S, N1286K, A1293T, P1321S, D1322G, R1335L, T1339I
F575S, M631L, R654L, R664K, R753G, D853E, V922A, R1114G D1135N, D1180G, G1218S,
E1219V, Q1221H, P1249S, N1286K, P1321S, D1322G, R1335L
M631L, R654L, R753G, K797E, D853E, V922A, D1012A, R1114G D1135N, G1218S,
E1219V, Q1221H, P1249S, N1317K, P1321S, D1322G, R1335L
F575S, M631L, R654L, R664K, R753G, D853E, V922A, R1114G, Y1131C, D1135N,
D1180G, G1218S, E1219V, Q1221H, P1249S, P1321S, D1322G, R1335L
F575S, M631L, R654L, R664K, R753G, D853E, V922A, R1114G, Y1131C, D1135N,
D1180G, G1218S, E1219V, Q1221H, P1249S, P1321S, D1322G, R1335L
F575S, D596Y, M631L, R654L, R664K, R753G, D853E, V922A, R1114G, Y1131C, D1135N,
D1180G, G1218S, E1219V, Q1221H, P1249S, Q1256R, P1321S, D1322G, R1335L
F575S, M631L, R654L, R664K, K710E, V750A, R753G, D853E, V922A, R1114G, Y1131C,
D1135N, D1180G, G1218S, E1219V, Q1221H, P1249S, P1321S, D1322G, R1335L
F575S, M631L, K649R, R654L, R664K, R753G, D853E, V922A, R1114G, Y1131C, D1135N,
K1156E, D1180G, G1218S, E1219V, Q1221H, P1249S, P1321S, D1322G, R1335L
F575S, M631L, R654L, R664K, R753G, D853E, V922A, R1114G, Y1131C, D1135N,
D1180G, G1218S, E1219V, Q1221H, P1249S, P1321S, D1322G, R1335L
F575S, M631L, R654L, R664K, R753G, D853E, V922A, I1057G, R1114G, Y1131C, D1135N,
D1180G, G1218S, E1219V, Q1221H, P1249S, N1308D, P1321S, D1322G, R1335L
M631L, R654L, R753G, D853E, V922A, R1114G, Y1131C, D1135N, E1150V, D1180G,
G1218S, E1219V, Q1221H, P1249S, P1321S, D1332G, R1335L
M631L, R654L, R664K, R753G, D853E, I1057V, Y1131C, D1135N, D1180G, G1218S,
E1219V, Q1221H, P1249S, P1321S, D1332G, R1335L
M631L, R654L, R664K, R753G, I1057V, R1114G, Y1131C, D1135N, D1180G, G1218S,
E1219V, Q1221H, P1249S, P1321S, D1332G, R1335L

[1038] Any of the above Cas9 variants displaying differential PAM specificities as compared to the canonical SpCas9 may be used in the herein disclosed prime editors.

[1039] P. Use of Prime Editing for Inserting Recombinase Target Sites

[1040] In another aspect, prime editing may be used to insert recombinase sites (or “recombinase recognition sequences”) into a desired genomic site. Insertion of recombinase sites provides a programmed location for effecting site-specific genetic changes in a genome. Such genetic changes can include, for example, genomic integration of a plasmid, genomic deletion or insertion, chromosomal translocations, and cassette exchanges, among other genetic changes. These exemplary types of genetic changes are illustrated in FIGS. 64B-64F. The installed recombinase recognition sequences may then be used to conduct site-specific recombination at that site to effectuate a variety of recombination outcomes, such as, excision, integration, inversion, or exchange of DNA fragments. For example, FIG. 65 illustrates the installation of a recombinase site that can then be used to integrate a DNA donor template comprising a GFP expression marker. Cells containing the integrated GFP expression system into the recombinase site will fluoresce.

[1041] The mechanism of installing a recombinase site into the genome is analogous to installing other sequences, such as peptide/protein and RNA tags, into the genome. A schematic exemplifying the installation of a recombinase target sequence is shows in FIG. 64(a). The process begins with selecting a desired target locus into which the recombinase target sequence will be introduced. Next, a prime editor fusion is provided (“RT-Cas9:gRNA”). Here, the “gRNA” refers to a PEgRNA, which can be designed using the principles described herein. The PEgRNA in various embodiments will comprise an architecture corresponding to FIG. 3D (5′-[˜20-nt spacer]-[gRNA core]-[extension arm]-3′, wherein the extension arm comprises in the 3′ to 5′ direction, a primer binding site (“A”), an edit template (“B”), and a homology arm (“C”). The edit template (“B”) will comprise a sequence corresponding to a recombinase site, i.e., a single strand RNA of the PEgRNA that codes for a complementary single strand DNA that is either the sense or the antisense strand of the recombinase site and which is incorporated into the genomic DNA target locus through the prime editing process.

[1042] In various aspects, the present disclosure provides for the use of a PE to introduce recombinase recognition sequences at high-value loci in human or other genomes, which, after exposure to site-specific recombinase(s), will direct precise and efficient genomic modifications (FIG. 64). In various embodiments show in FIG. 64, PE may be used to (b) insert a single SSR target for use as a site for genomic integration of a DNA donor template. (c) shows how a tandem insertion of SSR target sites can be used to delete a portion of the genome. (d) shows how a tandem insertion of SSR target sites can be used to invert a portion of the genome. (e) shows how the insertion of two SSR target sites at two distal chromosomal regions can result in chromosomal translocation. (f) shows how the insertion of two different SSR target sites in the genome can be used to exchange a cassette from a DNA donor template. Each of the types of genome modifications are envisioned by using PE to insert SSR targets, but this list also is not meant to be limiting.

[1043] PE-mediated introduction of recombinase recognition sequences could be particularly useful for the treatment of genetic diseases which are caused by large-scale genomic defects, such as gene loss, inversion, or duplication, or chromosomal translocations¹⁻⁷ (Table 6). For example, Williams-Beuren syndrome is a developmental disorder caused by a deletion of 24 in chromosome 721. No technology exists currently for the efficient and targeted insertion of multiple entire genes in living cells (the potential of PE to do such a full-length gene insertion is currently being explored but has not yet been established); however, recombinase-mediated integration at a target inserted by PE offers one approach towards a permanent cure for this and other diseases. In addition, targeted introduction of recombinase recognition sequences could be highly enabling for applications including generation of transgenic plants, animal research models, bioproduction cell lines, or other custom eukaryotic cell lines. For example, recombinase-mediated genomic rearrangement in transgenic plants at PE-specific targets could overcome one of the bottlenecks to generating agricultural crops with improved properties^{8,9}.

TABLE 6
Examples of genetic diseases linked to large-scale genomic
modifications that could be repaired through PE-based
installation of recombinase recognition sequences.

| DISEASE | CAUSE |
|---|---|
| TRISOMY 17P | GENE DUPLICATION |
| CHARCOT-MARIE- | GENE DUPLICATION |
| TOOTH DISEASE TYPE I | |
| SMITH-MAGENIS | GENE DELETION |
| SYNDROME | |
| WILLIAMS-BEUREN | GENE DELETION |
| SYNDROME | |
| DE LA CHAPELLE | CHROMOSOMAL |
| SYNDROME | TRANSLOCATION |
| DOWN SYNDROME | CHROMOSOMAL |
| (SOME FORMS) | TRANSLOCATION |
| HEMOPHILIA A | GENE INVERSION |
| HUNTER SYNDROME | GENE INVERSION |

[1044] A number of SSR family members have been characterized and their recombinase recognition sequences described, including natural and engineered tyrosine recombinases (Table 7), large serine integrases (Table 8), serine resolvases (Table 9), and tyrosine integrases (Table 10). Modified target sequences that demonstrate enhanced rates of genomic integration have also been described for several SSRs²²⁻³⁰. In addition to natural recombinases, programmable recombinases with distinct specificities have been developed³¹⁻⁴⁰. Using PE, one or more of these recognition sequences could be introduced into the genomic at a specified location, such as a safe harbor locus⁴¹⁻⁴³, depending on the desired application.

[1045] For example, introduction of a single recombinase recognition sequence in the genome by prime editing would result in integrative recombination with a DNA donor template (FIG. 64b). Serine integrases, which operate robustly in human cells, may be especially well-suited for gene integration^{44,45}.

[1046] Additionally, introduction of two recombinase recognition sequences could result in deletion of the intervening sequence, inversion of the intervening sequence, chromosomal translocation, or cassette exchange, depending on the identity and orientation of the targets (FIGS. 64C-64F). By choosing endogenous sequences that already closely resemble recombinase targets, the scope of editing required to introduce the complete recombinase target would be reduced.

[1047] Finally, several recombinases have been demonstrated to integrate into human or eukaryotic genomes at natively occurring pseudosites⁴⁶⁻⁶⁴. PE editing could be used to modify these loci to enhance rates of integration at these natural pseudosites, or alternatively, to eliminate pseudosites that may serve as unwanted off-target sequences.

[1048] This disclosure describes a general methodology for introducing recombinase target sequences in eukaryotic genomes using PE, the applications of which are nearly limitless. The genome editing reactions are intended for use with “prime editor,” a chimeric fusion of a CRISPR/Cas9 protein and a reverse-transcriptase domain, which utilizes a custom prime editing guide RNA (PEgRNA). By extension, Cas9 tools and homology-directed repair (HDR) pathways may also be exploited to introduce recombinase recognition sequences through DNA templates by lowering the rates of indels using several techniques⁶⁵⁻⁶⁷. A proof-of-concept experiment in human cell culture is shown in FIG. 65.

[1049] The following several tables are cited in the above description relating to PE-directed installation of recombinase recognition sequences and provide a listing of exemplary recombinases that may be used, and their cognate recombinase recognition sequences that may be installed by PE.

TABLE 7
Tyrosine recombinases and SSR target sequences.

| Recom- | | |
|---|---|---|
| binase | Recombinase recognition sequence | Name |
| Cre | ATAACTTCGTATAGCATACATTATACGAAGTTAT | loxP |
| | (SEQ ID NO: 517) | |
| Dre | TAACTTTAAATAATGCCAATTATTTAAAGTTA | rox |
| | (SEQ ID NO: 518) | |
| VCre | TCAATTTCTGAGAACTGTCATTCTCGGAAATTGA | loxV |
| | (SEQ ID NO: 519) | |
| SCre | CTCGTGTCCGATAACTGTAATTATCGGACATGAT | loxS |
| | (SEQ ID NO: 520) | |
| Flp | GAAGTTCCTATTCTCTAGAAAGTATAGGAACTTC | FRT |
| | (SEQ ID NO: 521) | |
| B2 | GAGTTTCATTAAGGAATAACTAATTCCCTAATGAA | loxB |
| | ACTC (SEQ ID NO: 522) | |
| B3 | GGTTGCTTAAGAATAAGTAATTCTTAAGCAACC | loxB3 |
| | (SEQ ID NO: 523) | |
| Kw | ACGAAAAATGGTAAGGAATAGACCATTCCTTACC | |
| | ATTTTTGGT (SEQ ID NO: 524) | |
| R | TTGATGAAAGAATAACGTATTCTTTCATCAA | RS |
| | (SEQ ID NO: 525) | |
| TD1-40 | GTGCGTCAAATAATAACGTATTATTTGACACTT | TDRS |
| | (SEQ ID NO: 526) | |
| Vika | AATAGGTCTGAGAACGCCCATTCTCAGACGTATT | vox |
| | (SEQ ID NO: 527) | |
| Nigri | TGAATGTCCTATAATTACACTTATAGGACATTCA | nox |
| | (SEQ ID NO: 528) | |
| Panto | GAAACTTTAAATAATAAGTCTTATTTAAAGTTTC | pox |
| | (SEQ ID NO: 529) | |
| Kd | TTATCAGACAAATGTCTGATATCGTTT | loxK |
| | (SEQ ID NO: 530) | |
| Fre | ATATATACGTATATAGACATATATACGTATATAT | loxH |
| | (SEQ ID NO: 531) | |
| CreALSHG | ATAACTCTATATAATGTATGCTATATAGAGTTAT | loxM7 |
| | (SEQ ID NO: 532) | |
| Tre | ACAACATCCTATTACACCCTATATGCCAACATGG | loxLTR |
| | (SEQ ID NO: 533) | |
| Brec1 | AACCCACTGCTTAAGCCTCAATAAAGCTTGCCTT | loxBTR |
| | (SEQ ID NO: 534) | |
| Cre-R3M3 | GATACAACGTATATACCTTTCTATACGTTGTTTA | loxK2 |
| | (SEQ ID NO: 535) | |

TABLE 8
Large serine integrases and SSR target sequences.

| | Recombinase recognition sequence | Recombinase recognition sequence |
|---|---|---|
| Recombinase | Left | Right |
| Bxb1 | GGTTTGTCTGGTCAACCACCGC | GGCTTGTCGACGACGGCGGTCTCC |
| | GGTCTCAGTGGTGTACGGTACA | GTCGTCAGGATCAT |
| | AACC (SEQ ID NO: 536) | (SEQ ID NO: 537) |
| phiC31 | GTGCCCCAACTGGGGTAACCTT | TGCGGGTGCCAGGGCGTGCCCTTG |
| | TGAGTTCTCTCAGTTGGGGG | GGCTCCCCGGGCGCGTACTCC |
| | (SEQ ID NO: 538) | (SEQ ID NO: 539) |
| R4 | TGTTCCCCAAAGCGATACCACT | GCATGTTCCCCAAAGCGATACCAC |
| | TGAAGCAGTGGTACTGCTTGTG | TTGAAGCAGTGGTACTGCTTGTGG |
| | GGTACA (SEQ ID NO: 540) | GTACACTCTGCGGGTG |
| | | (SEQ ID NO: 541) |
| phiBT1 | GGTGCTGGGTTGTTGTCTCTGG | CAGGTTTTTGACGAAAGTGATCCA |
| | ACAGTGATCCATGGGAAACTA | GATGATCCAG |
| | CTCAGCACC (SEQ ID NO: 542) | (SEQ ID NO: 543) |
| MJ1 (phiFC1) | ATTTTAGGTATATGATTTTGTT | CAAAGGATCACTGAATCAAAAGTA |
| | TATTAGTGTAAATAACACTATG | TTGCTCATCCACGCGAAA |
| | TACCTAAAAT | |
| | (SEQ ID NO: 544) | (SEQ ID NO: 545) |
| MR11 | TTTGTGCGGAACTACGAACAGT | CGAAAATGTATGGAGGCACTTGTA |
| | TCATTAATACGAAGTGTACAA | TCAATATAGGATGTATACCTTCGA |
| | ACTTCCATACAA | AGACACTT |
| | (SEQ ID NO: 546) | (SEQ ID NO: 547) |
| TP901-1 | GAGTTTTTATTTCGTTTATTTCA | ATGCCAACACAATTAACATCTCAA |
| | ATTAAGGTAACTAAAAAACTC | TCAAGGTAAATGCTTTTTGCTTTTT |
| | CTTTTAAGG (SEQ ID NO: 548) | TTGC (SEQ ID NO: 549) |
| A118 | TTCCTCGTTTTCTCTCGTTGGA | TTTCGGATCAAGCTATGAAGGACG |
| | AGAAGAAGAAACGAGAAA | CAAAGAGGGAACTAAA |
| | (SEQ ID NO: 550) | (SEQ ID NO: 551) |
| U153 | TTCCTCGTTTTCTCTCGTTGGAC | TTTCGGATCAAGCTATGAAGGACG |
| | GGAAACGAATCGAGAAA | CAAAGAGGGAACTAAA (SEQ ID |
| | (SEQ ID NO: 552) | NO: 553) |
| phiRV1 | GTAGTGTATCTCACAGGTCCAC | GAAGGTGTTGGTGCGGGGTTGGCC |
| | GGTTGGCCGTGGACTGCTGAA | GTGGTCGAGGTGGGGT |
| | GAACATTCC (SEQ ID NO: 554) | (SEQ ID NO: 555) |
| phi370.1 | AAAAAAATACAGCGTTTTTCAT | TTGTAAAGGAGACTGATAATGGCA |
| | GTACAACTATACTAGTTGTAGT | TGTACAACTATACTCGTCGGTAAA |
| | GCCTAAAA (SEQ ID NO: 556) | AAGGCA (SEQ ID NO: 557) |
| TG1 | TCCAGCCCAACAGTGTTAGTCT | GATCAGCTCCGCGGGCAAGACCTT |
| | TTGCTCTTACCCAGTTGGGCGG | TCTCCTTCACGGGGTGGAAGGTC |
| | GA (SEQ ID NO: 558) | (SEQ ID NO: 559) |
| WB | CTAGTTTTAAAGTTYGGTTATTA | CGGAAGGTAGCGTCAACGATAGGT |
| | GTTACTGTGATATTTATCACGG | GTAACTGTCGTGTTTGTAACGGTAC |
| | TACCCAATAACCAATGAAT | TTCCAACAGCTGGCGCCGCCAC |
| | (SEQ ID NO: 560) | (SEQ ID NO: 561) |
| BL3 | CAATGAAAAACTAGGCATGTA | TTTCCACAGACAACTCACGTGGAG |
| | GAAGTTGTTTGT | GTAGTCAC |
| | (SEQ ID NO: 562) | (SEQ ID NO: 563) |
| SprA | TGTAGTAAGTATCTTAATATAC | CACCCATTGTGTTCACAGGAGATA |
| | AGCTTTATCTGTTTTTTAAGAT | CAGCTTTATCTGTACTGATATTAAT |
| | ACTTACTACTTT | GACATGCTG |
| | (SEQ ID NO: 564) | (SEQ ID NO: 565) |
| phiJoe | AGTTGTGGCCATGTGTCCATCT | ATCTGGATGTGGGTGTCCATCTGCG |
| | GGGGGCAGATGGAGACGGGGT | GGCAGACGCCGCAGTCGAAGCACG |
| | CACA (SEQ ID NO: 566) | G (SEQ ID NO: 567) |
| — | — | ACCTTGATCTCGGTGTCCATCGCCG |
| | | GGCAGACGCCGCAGTCGAAGCACG |
| | | G (SEQ ID NO: 568) |
| phiK38 | CCCTAATACGCAAGTCGATAA | GAGCGCCGGATCAGGGAGTGGACG |
| | CTCTCCTGGGAGCGTTGACAAC | GCCTGGGAGCGCTACACGCTGTGG |
| | TTGCGCACCCTGATCTG | CTGCGGTCGGTGC |
| | (SEQ ID NO: 569) | (SEQ ID NO: 570) |
| Int2 | GCTCATGTATGTGTCTACGCGA | GGACGGCGCAGAAGGGGAGTAGCT |
| | GATTCTCGCCCGAGAACTTCTG | CTTCGCCGGACCGTCGACATACTG |
| | CAAGGCACTGCTCTTGGCT | CTCAGCTCGTC |
| | (SEQ ID NO: 571) | (SEQ ID NO: 572) |
| Int3 | ATGGATAAAAAAATACAGCGT | GTTTGTAAAGGAGACTGATAATGG |
| | TTTTCATGTACAACTATACTAG | CATGTACAACTATACTCGTCGGTA |
| | TTGTAGTGCCTAAATAATGCTT | AAAAGGCATCTTAT (SEQ ID NO: |
| | (SEQ ID NO: 573) | 574) |
| Int4 | AAAAATTACAAAGTTTTCAACC | TTCCAAAGAGCGCCCAACGCGACC |
| | CTTGATTTGAATTAGCGGTCAA | TGAAATTTGAATAAGACTGCTGCTT |
| | ATAATTTGTAATTCGTTT | GTGTAAAGGCGATGATT (SEQ ID |
| | (SEQ ID NO: 575) | NO: 576) |
| Int7 | GTGTTATAAACCTGTGTGAGAG | AGACGAGAAACGTTCCGTCCGTCT |
| | TTAAGTTTACATGCCTAACCTT | GGGTCAGTTGGGCAAAGTTGATGA |
| | AACTTTTACGCAGGTTCAGCTT | CCGGGTCGTCCGTT (SEQ ID NO: |
| | (SEQ ID NO: 577) | 578) |
| Int8 | TTAATAAACTATGGAAGTATGT | CAATCATCAGATAACTATGGCGGC |
| | ACAGTCTTGCAATGTTGAGTGA | ACGTGCATTAACCACGGTTGTATCC |
| | ACAAACTTCCATAATAAAAT | CGTCTAAAGTACTCGT (SEQ ID NO: |
| | (SEQ ID NO: 579) | 580) |
| Int9 | GTGGTTGTTTTTGTTGGAAGTG | TTTATATTGCGAAAAATAATTGGC |
| | TGTATCAGGTATCTGCATAGTT | GAACGAGGTAACTGGATACCTCAT |
| | ATTCCGAACTTCCAATTA | CCGCCAATTAAAATTTG |
| | (SEQ ID NO: 581) | (SEQ ID NO: 582) |
| Int10 | GGAAAATATAAATAATTTTAGT | AGC AC GCTGATAATCAGC AAGACC |
| | AACCTACATCTCAATCAAGGATACCAAC | ATTTCCACCAATGTAAAA |
| | AGTAAAACTCTCACTCTT | GCTTTAACCTTAGC |
| | (SEQ ID NO: 583) | (SEQ ID NO: 584) |
| Int11 | GTTTATATGTTTACTAATAAGA | ATGGATTTTGCAGATTCCCAGATGC |
| | CGCTCTCAACCCATAAAGTCTT | CCCTACAGAAAGAGGTACAAAACA |
| | ATTAGTAAACATATTTCAACT | TTTATTGGAATTAATT |
| | (SEQ ID NO: 585) | (SEQ ID NO: 586) |
| Int12 | TTTTTGTATGTTAGTTGTGTCA | GTTCGTGGTAACTATGGGTGGTAC |
| | CTGGGTAGACCTAAATAGTGA | AGGTGCCACATTAGTTGTACCATTT |
| | CACAACTGCTATTAAAATTTAA | ATGTTTATGTGGTTAAC |
| | (SEQ ID NO: 587) | (SEQ ID NO: 588) |
| Int13 | CAATAACGGTTGTATTTGTAGA | GCATACATTGTTGTTGTTTTTCCAG |
| | ACTTGACCAGTTGTTTTAGTAA | ATCCAGTTGGTCCTGTAAATATAA |
| | CATAAATACAACTCCGAATA | GCAATCCATGTGAGT |
| | (SEQ ID NO: 589) | (SEQ ID NO: 590) |
| LI | GTTTAGTATCTCGTTATCTCTC | TAACTTTTTCGGATCGAGTTATGAT |
| | GTTGGAGGGAGAAGAAACGGG | GGACGTAAAGAGGGAACAAAGCA |
| | ATACCAAAA (SEQ ID NO: 591) | TCTA (SEQ ID NO: 592) |
| Peaches | TAGTTTCCAATGTTACAGGAAC | CGGTCTCCATCGGGATCTGCTGATC |
| | TGCTGGCAGAATCCAACACATT | GAGCAGCATGCCGACCA |
| | GGAAGTCG (SEQ ID NO: 593) | (SEQ ID NO: 594) |
| Bxz2 | TAACCGCAAGTGTACATCCCTC | CGGTCTCCATCGGGATCTGCTGATC |
| | GGCTGGCCGAGACAAGTACAG | GAGCAGCATGCCGACCA |
| | TTGCGACAG (SEQ ID NO: 595) | (SEQ ID NO: 596) |
| SV1 | ATGTGGTCCTTTAGATCCACTG | CATCAGGGCGGTCAGGCCGTAGAT |
| | ACGTGGGTCAGTGTCTCTAAAG | GTGGAAGAAACGGCAGCACGGCG |
| | GACTCGCG (SEQ ID NO: 597) | AGGACG (SEQ ID NO: 598) |

TABLE 9
Serine resolvases and SSR target sequences.

| | Recombinase | Recombinase |
|---|---|---|
| Resolvase | recognition sequence Left | recognition sequence Right |
| Gin | CGTTTCCTGTAAACCGAGGTTTTG | CGTTTCCTGTAAACCGAGGTTTTG |
| | GATAAACA (SEQ ID NO: 599) | GATAATGG (SEQ ID NO: 600) |
| Cin | GAGTTCTCTTAAACCAAGGTTTA | GAGTTCTCTTAAACCAAGGTATT |
| | GGATTGAAA (SEQ ID NO: 601) | GGATAACAG (SEQ ID NO: 602) |
| Hin | TGGTTCTTGAAAACCAAGGTTTTT | AAATTTTCCTTTTTGGAAGGTTTT |
| | GATAAAGC (SEQ ID NO: 603) | TGATAACCA (SEQ ID NO: 604) |
| Min | GCCTTCCCCTAAACCAACGTTTTT | GCCTTCCCCCAAACCAAGGTAAT |
| | ATGCCGCC (SEQ ID NO: 605) | CAAGAACGC (SEQ ID NO: 606) |
| Sin | TTGTGAAATTTGGGTACACCCTA | CGTATGATTAGGGTGTATATTAA |
| | ATCATACAA (SEQ ID NO: 607) | TTT (SEQ ID NO: 608) |

TABLE 10
Tyrosine integrases and target sequences.

| Integrase | attP | attB |
|---|---|---|
| HK022 | CAAATGATTTTATTTTGACTAATAA | GCACTTTAGGTGAAAAAGGTT |
| | TGACCTACTTACATTAATTTACTGAT | (SEQ ID NO: 610) |
| | AATTAAAGAGATTTTAAATATACAA | |
| | CTTATTCACCTAAAGGATGACAAAA | |
| | (SEQ ID NO: 609) | |
| | TAACATTAATCACTTAAAAATCATC | |
| | GCATTACACTAATCTGTGGTTAAAT | |
| | GATAGACTACATAATGCGACAAAA | |
| | CGCAACATATCCAGTCACTATGAAT | |
| | CAACTACTTAGATAGTATTAGTGAC | |
| | CT (SEQ ID NO: 611) | |
| P22 | CTAAGTGGTTTGGGACAAAAATGGG | GCAGCGCATTCGTAATGCGA |
| | ACATACAAATCTTTGCATCGGTTTG | AGGTCGT (SEQ ID NO: 613) |
| | CAAGGCTTTGCATGTCTTTCGAAGA | |
| | TGGGACGTGTGAGCGCAGGTATGAC | |
| | GTGGTATGTGTTGACTTAAAAGGTA | |
| | GTTCTTATAATTCGTAATGCGAAGG | |
| | TCGTAGGTTCGACTCCTATTATCGG | |
| | CACCAGTTAAATCAAATACTTACGT | |
| | ATTATTCGTGCCTTCCTTATTTTTAC | |
| | TGTGGGACATATTTGGGACAGAAGT | |
| | ACCAAAAA (SEQ ID NO: 612) | |
| L5 | GCGATCCCCATCCGCGACGTGCCAA | GAGCGGGCGACGGGAATCG |
| | CTAGGTCTCCTCTCGTCGTGAACAA | AACCCGCGTAGCTAGTTTGG |
| | GGCTACCGGGTTGCAACTCCTGTGC | AAGA (SEQ ID NO: 615) |
| | AACTCTCAGGCTTCAACGCGCTTCT | |
| | ACGACCTGCAATTTCTTTCCACTTA | |
| | GAGGATGCAGCCGAGAGGGGTAAA | |
| | AACCTATCTTGACCGGCCCATATGT | |
| | GGTCGGCAGACACCCATTCTTCCAA | |
| | ACTAGCTACGCGGGTTCGATTCCCG | |
| | TCGCCCGCTCCGCTGGTCAGAGGGT | |
| | GTTTTCGCCCTCTGGCCATTTTTCTT | |
| | TCCAGGGGTCTGCAACTCTTGTGCG | |
| | ACTCTTCTGACCTGGGCATACGCGG | |
| | TTGCAACGCATCCCTGATCTGGCTA | |
| | CTTTCGATGCTGACAAACGAATAGA | |
| | GCCCCCCGCCTGCGCGAACAGACG | |
| | AGGGGCATTCACA (SEQ ID NO: 614) | |

[1050] In various other aspects, the present disclosure relates to methods of using PE to install one or more recombinase recognition sequence and their use in site-specific recombination.

[1051] In some embodiments, the site-specific recombination may effectuate a variety of recombination outcomes, such as, excision, integration, inversion, or exchange of DNA fragments.

[1052] In some embodiments, the methods are useful for inducing recombination of or between two or more regions of two or more nucleic acid (e.g., DNA) molecules. In other embodiments, the methods are useful for inducing recombination of or between two or more regions in a single nucleic acid molecule (e.g., DNA).

[1053] In some embodiments, the disclosure provides a method for integrating a donor DNA template by site-specific recombination, comprising: (a) installing a recombinase recognition sequence at a genomic locus by prime editing; (b) contacting the genomic locus with a DNA donor template that also comprises the recombinase recognition sequence in the presence of a recombinase.

[1054] In other embodiments, the disclosure provides a method for deleting a genomic region by site-specific recombination, comprising: (a) installing a pair of recombinase recognition sequences at a genomic locus by prime editing; (b) contacting the genomic locus with a recombinase, thereby catalyzing the deletion of the genomic region between the pair of recombinase recognition sequences.

[1055] In yet other embodiments, the disclosure provides a method for inverting a genomic region by site-specific recombination, comprising: (a) installing a pair of recombinase recognition sequences at a genomic locus by prime editing; (b) contacting the genomic locus with a recombinase, thereby catalyzing the inversion of the genomic region between the pair of recombinase recognition sequences.

[1056] In still other embodiments, the disclosure provides a method for inducing chromosomal translocation between a first genomic site and a second genomic site, comprising: (a) installing a first recombinase recognition sequence at a first genomic locus by prime editing; (b) installing a second recombinase recognition sequence at a second genomic locus by prime editing; (c) contacting the first and the second genomic loci with a recombinase, thereby catalyzing the chromosomal translocation of the first and second genomic loci.

[1057] In other embodiments, the disclosure provides a method for inducing cassette exchange between a genomic locus and a donor DNA comprising a cassette, comprising: (a) installing a first recombinase recognition sequence at a first genomic locus by prime editing; (b) installing a second recombinase recognition sequence at a second genomic locus by prime editing; (c) contacting the first and the second genomic loci with a donor DNA comprising a cassette that is flanked by the first and second recombinase recognition sequences and a recombinase, thereby catalyzing the exchange of the flanked genomic locus and the cassette in the DNA donor.

[1058] In various embodiments involving the insertion of more than one recombinase recognition sequences in the genome, the recombinase recognition sequences can be the same or different. In some embodiments, the recombinase recognition sequences are the same. In other embodiments, that recombinase recognition sequences are different.

[1059] In various embodiments, the recombinase can be a tyrosine recombinase, such as Cre, Dre, Vcre, Scre, Flp, B2, B3, Kw, R, TD1-40, Vika, Nigri, Panto, Kd, Fre, Cre(ALSHG), Tre, Brec1, or Cre-R3M3, as shown in Table 7. In such embodiments, the recombinase recognition sequence may be an RRS of Table 7 that corresponds to the recombinase under use.

[1060] In various other embodiments, the recombinase can be a large serine recombinase, such as Bxb1, PhiC31, R4, phiBT1, MJ1, MR11, TP901-1, A118, V153, phiRV1, phi370.1, TG1, WB, BL3, SprA, phiJoe, phiK38, Int2, Int3, Int4, Int7, Int8, Int9, Int10, Int11, Int12, Int13, L1, peaches, Bxz2, or SV1, as shown in Table 8. In such embodiments, the recombinase recognition sequence may be an RRS of Table 8 that corresponds to the recombinase under use.

[1061] In still other embodiments, the recombinase can be a serine recombinase, such as Bxb1, PhiC31, R4, phiBT1, MJ1, MR11, TP901-1, A118, V153, phiRV1, phi370.1, TG1, WB, BL3, SprA, phiJoe, phiK38, Int2, Int3, Int4, Int7, Int8, Int9, Int10, Int11, Int12, Int13, L1, peaches, Bxz2, or SV1, as shown in Table 8. In such embodiments, the recombinase recognition sequence may be an RRS of Table 8 that corresponds to the recombinase under use.

[1062] In other embodiments, the recombinase can be a serine resolvase, such as Gin, Cin, Hin, Min, or Sin, as shown in Table 9. In such embodiments, the recombinase recognition sequence may be an RRS of Table 9 that corresponds to the recombinase under use.

[1063] In various other embodiments, the recombinase can be a tyrosine integrase, such as HK022, P22, or L5, as shown in Table 10. In such embodiments, the recombinase recognition sequence may be an RRS of Table 10 that corresponds to the recombinase under use.

[1064] In some embodiments, any of the methods for site-specific recombination with PE can be performed in vivo or in vitro. In some embodiments, any of the methods for site-specific recombination are performed in a cell (e.g., recombine genomic DNA in a cell). The cell can be prokaryotic or eukaryotic. The cell, such as a eukaryotic cell, can be in an individual, such as a subject, as described herein (e.g., a human subject). The methods described herein are useful for the genetic modification of cells in vitro and in vivo, for example, in the context of the generation of transgenic cells, cell lines, or animals, or in the alteration of genomic sequence, e.g., the correction of a genetic defect, in a cell in a subject.

### REFERENCES CITED FOR SECTION L

[1065] Each of the following references are cited in Example 17, each of which are incorporated herein by reference.
[1066] 1. Feuk, L. Inversion variants in the human genome: role in disease and genome architecture. Genome Med 2, 11 (2010).
[1067] 2. Zhang, F., Gu, W., Hurles, M. E. & Lupski, J. R. Copy number variation in human health, disease, and evolution. Annu Rev Genomics Hum Genet 10, 451-481 (2009).
[1068] 3. Shaw, C. J. & Lupski, J. R. Implications of human genome architecture for rearrangement-based disorders: the genomic basis of disease. Hum Mol Genet 13 Spec No 1, R57-64 (2004).
[1069] 4. Carvalho, C. M., Zhang, F. & Lupski, J. R. Evolution in health and medicine Sackler colloquium: Genomic disorders: a window into human gene and genome evolution. Proc Natl Acad Sci USA 107 Suppl 1, 1765-1771 (2010).
[1070] 5. Rowley, J. D. Chromosome translocations: dangerous liaisons revisited. Nat Rev Cancer 1, 245-250 (2001).
[1071] 6. Aplan, P. D. Causes of oncogenic chromosomal translocation. Trends Genet 22, 46-55 (2006).
[1072] 7. McCarroll, S. A. & Altshuler, D. M. Copy-number variation and association studies of human disease. Nat Genet 39, S37-42 (2007).

### [8] Methods of Treatment

[1073] The instant disclosure provides methods for the treatment of a subject diagnosed with a disease associated with or caused by a point mutation, or other mutations (e.g., deletion, insertion, inversion, duplication, etc.) that can be corrected by the prime editing system provided herein, as exemplified, but not limited to prion disease (e.g., Example 5 herein), trinucleotide repeat expansion disease (e.g., Example 3 herein), or CDKL5 Deficiency Disorder (CDD) (e.g., Example 23 herein).

[1074] Virtually any disease-causing genetic defect may be repaired by using prime editing, which includes the selection of an appropriate prime editor fusion protein (including a napDNAbp and a polymerase (e.g., a reverse transcriptase), and designing of an appropriate PEgRNA designed to (a) target the appropriate target DNA containing an edit site, and (b) provide a template for the synthesis of a single strand of DNA from the 3′ end of the nick site that includes the desired edit which displaces and replaces the endogenous strand immediately downstream of the nick site. Prime editing can be used, without limitation, to (a) install mutation-correcting changes to a nucleotide sequence, (b) install protein and RNA tags, (c) install immunoepitopes on proteins of interest, (d) install inducible dimerization domains in proteins, (e) install or remove sequences to alter that activity of a biomolecule, (f) install recombinase target sites to direct specific genetic changes, and (g) mutagenesis of a target sequence by using an error-prone RT.

[1075] The method of treating a disorder can involve as an early step the design of an appropriate PEgRNA and prime editor fusion protein in accordance with the methods described herein, which include a number of considerations that may be taken into account, such as:

(a) the target sequence, i.e., the nucleotide sequence in which one or more nucleobase
modifications are desired to be installed by the prime editor;
(b) the location of the cut site within the target sequence, i.e., the specific nucleobase position at
which the prime editor will induce a single-stand nick to create a 3′ end RT primer sequence on
one side of the nick and the 5′ end endogenous flap on the other side of the nick (which ultimately
is removed by FENI or equivalent thereto and replaced by the 3′ ssDNA flap. The cut site creates
the 3′ end primer sequence which becomes extended by the polymerase of the PE fusion protein
(e.g., a RT enzyme) during RNA-dependent DNA polymerization to create the 3′ ssDNA flap
containing the desired edit, which then replaces the 5′ endogenous DNA flap in the target
sequence.
(c) the available PAM sequences (including the canonical SpCas9 PAM sites, as well as non-
canonical PAM sites recognized by Cas9 variants and equivalents with expanded or differing PAM
specificities);
(d) the spacing between the available PAM sequences and the location of the cut site in the PAM
strand;
(e) the particular Cas9, Cas9 variant, or Cas9 equivalent of the prime editor available to be used
(which in part is dictated by the available PAM);
(f) the sequence and length of the primer binding site;
(g) the sequence and length of the edit template;
(h) the sequence and length of the homology arm;
(i) the spacer sequence and length; and
(j) the gRNA core sequence.

[1076] A suitable PEgRNA, and optionally a nicking-sgRNA design guide for second-site nicking, can be designed by way of the following exemplarly step-by-step set of instructions which takes into account one or more of the above considerations. The steps reference the examples shown in FIGS. 70A-70I.

1. Define the target sequence and the edit. Retrieve the sequence of the target DNA region (˜200 bp) centered around the location of the desired edit (point mutation, insertion, deletion, or combination thereof). See FIG. 70A.
2. Locate target PAMs. Identify PAMs in the proximity to the desired edit location. PAMs can be identified on either strand of DNA proximal to the desired edit location. While PAMs close to the edit position are preferred (i.e., wherein the nick site is less than 30 nt from the edit position, or less than 29 nt, 28 nt, 27 nt, 26 nt, 25 nt, 24 nt, 23 nt, 22 nt, 21 nt, 20 nt, 19 nt, 18 nt, 17 nt, 16 nt, 15 nt, 14 nt, 13 nt, 12 nt, 11 nt, 10 nt, 9 nt, 8 nt, 7 nt, 6 nt, 5 nt, 4 nt, 3 nt, or 2 nt from the edit position to the nick site), it is possible to install edits using protospacers and PAMs that place the nick≥30 nt from the edit position. See FIG. 70B.
3. Locate the nick sites. For each PAM being considered, identify the corresponding nick site and on which strand. For Sp Cas9 H840A nickase, cleavage occurs in the PAM-containing strand between the 3^{rd} and 4^{th} bases 5′ to the NGG PAM. All edited nucleotides must exist 3′ of the nick site, so appropriate PAMs must place the nick 5′ to the target edit on the PAM-containing strand. In the example shown below, there are two possible PAMs. For simplicity, the remaining steps will demonstrate the design of a PEgRNA using PAM 1 only. See FIG. 70C.
4. Design the spacer sequence. The protospacer of SpCas9 corresponds to the 20 nucleotides 5′ to the NGG PAM on the PAM-containing strand. Efficient Pol III transcription initiation requires a G to be the first transcribed nucleotide. If the first nucleotide of the protospacer is a G, the spacer sequence for the PEgRNA is simply the protospacer sequence. If the first nucleotide of the protospacer is not a G, the spacer sequence of the PEgRNA is G followed by the protospacer sequence. See FIG. 70D.
5. Design a primer binding site (PBS). Using the starting allele sequence, identify the DNA primer on the PAM-containing strand. The 3′ end of the DNA primer is the nucleotide just upstream of the nick site (i.e. the 4^{th} base 5′ to the NGG PAM for Sp Cas9). As a general design principle for use with PE2 and PE3, a PEgRNA primer binding site (PBS) containing 12 to 13 nucleotides of complementarity to the DNA primer can be used for sequences that contain ˜40-60% GC content. For sequences with low GC content, longer (14- to 15-nt) PBSs should be tested. For sequences with higher GC content, shorter (8- to 11-nt) PBSs should be tested. Optimal PBS sequences should be determined empirically, regardless of GC content. To design a length-p PBS sequence, take the reverse complement of the first p nucleotides 5′ of the nick site in the PAM-containing strand using the starting allele sequence. See FIG. 70E.
6. Design an RT template (or DNA synthesis template). The RT template (or DNA synthesis template where the polymerase is not reverse transcriptase) encodes the designed edit and homology to the sequence adjacent to the edit. In one embodiment, these regions correspond to the DNA synthesis template of FIG. 3D and FIG. 3E, wherein the DNA synthesis template comprises the “edit template” and the “homology arm.” Optimal RT template lengths vary based on the target site. For short-range edits (positions +1 to +6), it is recommended to test a short (9 to 12 nt), a medium (13 to 16 nt), and a long (17 to 20 nt) RT template. For long-range edits (positions +7 and beyond), it is recommended to use RT templates that extend at least 5 nt (preferably 10 or more nt) past the position of the edit to allow for sufficient 3′ DNA flap homology. For long-range edits, several RT templates should be screened to identify functional designs. For larger insertions and deletions (≥5 nt), incorporation of greater 3′ homology (˜20 nt or more) into the RT template is recommended. Editing efficiency is typically impaired when the RT template encodes the synthesis of a G as the last nucleotide in the reverse transcribed DNA product (corresponding to a C in the RT template of the PEgRNA). As many RT templates support efficient prime editing, avoidance of G as the final synthesized nucleotide is recommended when designing RT templates. To design a length-r RT template sequence, use the desired allele sequence and take the reverse complement of the first r nucleotides 3′ of the nick site in the strand that originally contained the PAM. Note that compared to SNP edits, insertion or deletion edits using RT templates of the same length will not contain identical homology. See FIG. 70F.
7. Assemble the full PEgRNA sequence. Concatenate the PEgRNA components in the following order (5′ to 3′): spacer, scaffold, RT template and PBS. See FIG. 70G.
8. Designing nicking-sgRNAs for PE3. Identify PAMs on the non-edited strand upstream and downstream of the edit. Optimal nicking positions are highly locus-dependent and should be determined empirically. In general, nicks placed 40 to 90 nucleotides 5′ to the position across from the PEgRNA-induced nick lead to higher editing yields and fewer indels. A nicking sgRNA has a spacer sequence that matches the 20-nt protospacer in the starting allele, with the addition of a 5′-G if the protospacer does not begin with a G. See FIG. 70H.
9. Designing PE3b nicking-sgRNAs. If a PAM exists in the complementary strand and its corresponding protospacer overlaps with the sequence targeted for editing, this edit could be a candidate for the PE3b system. In the PE3b system, the spacer sequence of the nicking-sgRNA matches the sequence of the desired edited allele, but not the starting allele. The PE3b system operates efficiently when the edited nucleotide(s) falls within the seed region (˜10 nt adjacent to the PAM) of the nicking-sgRNA protospacer. This prevents nicking of the complementary strand until after installation of the edited strand, preventing competition between the PEgRNA and the sgRNA for binding the target DNA. PE3b also avoids the generation of simultaneous nicks on both strands, thus reducing indel formation significantly while maintaining high editing efficiency. PE3b sgRNAs should have a spacer sequence that matches the 20-nt protospacer in the desired allele, with the addition of a 5′ G if needed. See FIG. 70I.

[1077] The above step-by-step process for designing a suitable PEgRNA and a second-site nicking sgRNA is not meant to be limiting in any way. The disclosure contemplates variations of the above-described step-by-step process which would be derivable therefrom by a person of ordinary skill in the art.

[1078] Once a suitable PEgRNA and PE fusion protein are selected/designed, they may be administered by a suitable methodology, such as by vector-based transfection (in which one or more vectors comprising DNA encoding the PEgRNA and the PE fusion protein and which are expressed within a cell upon transfection with the vectors), direct delivery of the PE fusion protein complexed with the PEgRNA (e.g., RNP delivery) in a delivery format (e.g., lipid particles, nanoparticles), or by a mRNA-based delivery system. Such methods are described herein in the present disclosure and any know method may be utilized.

[1079] The PEgRNA and PE fusion protein (or together, referred to as the PE complex) can be delivered to a cell in a therapeutically effective amount such that upon contacting the target DNA of interest, the desired edit becomes installed therein.

[1080] Any disease is conceivably treatable by such methods so long as delivery to the appropriate cells is feasible. The person having ordinary skill in the art will be able to choose and/or select a PE delivery methodology to suit the intended purpose and the intended target cells.

[1081] For example, in some embodiments, a method is provided that comprises administering to a subject having such a disease, e.g., a cancer associated with a point mutation as described above, an effective amount of the prime editing system described herein that corrects the point mutation or introduces a deactivating mutation into a disease-associated gene as mediated by homology-directed repair in the presence of a donor DNA molecule comprising desired genetic change. In some embodiments, a method is provided that comprises administering to a subject having such a disease, e.g., a cancer associated with a point mutation as described above, an effective amount of the prime editing system described herein that corrects the point mutation or introduces a deactivating mutation into a disease-associated gene. In some embodiments, the disease is a proliferative disease. In some embodiments, the disease is a genetic disease. In some embodiments, the disease is a neoplastic disease. In some embodiments, the disease is a metabolic disease. In some embodiments, the disease is a lysosomal storage disease. Other diseases that can be treated by correcting a point mutation or introducing a deactivating mutation into a disease-associated gene will be known to those of skill in the art, and the disclosure is not limited in this respect.

[1082] The instant disclosure provides methods for the treatment of additional diseases or disorders, e.g., diseases or disorders that are associated or caused by a point mutation that can be corrected by TPRT-mediated gene editing. Some such diseases are described herein, and additional suitable diseases that can be treated with the strategies and fusion proteins provided herein will be apparent to those of skill in the art based on the instant disclosure. Exemplary suitable diseases and disorders are listed below. It will be understood that the numbering of the specific positions or residues in the respective sequences depends on the particular protein and numbering scheme used. Numbering might be different, e.g., in precursors of a mature protein and the mature protein itself, and differences in sequences from species to species may affect numbering. One of skill in the art will be able to identify the respective residue in any homologous protein and in the respective encoding nucleic acid by methods well known in the art, e.g., by sequence alignment and determination of homologous residues. Exemplary suitable diseases and disorders include, without limitation: 2-methyl-3-hydroxybutyric aciduria; 3 beta-Hydroxysteroid dehydrogenase deficiency; 3-Methylglutaconic aciduria; 3-Oxo-5 alpha-steroid delta 4-dehydrogenase deficiency; 46,XY sex reversal, type 1, 3, and 5; 5-Oxoprolinase deficiency; 6-pyruvoyl-tetrahydropterin synthase deficiency; Aarskog syndrome; Aase syndrome; Achondrogenesis type 2; Achromatopsia 2 and 7; Acquired long QT syndrome; Acrocallosal syndrome, Schinzel type; Acrocapitofemoral dysplasia; Acrodysostosis 2, with or without hormone resistance; Acroerythrokeratoderma; Acromicric dysplasia; Acth-independent macronodular adrenal hyperplasia 2; Activated PI3K-delta syndrome; Acute intermittent porphyria; deficiency of Acyl-CoA dehydrogenase family, member 9; Adams-Oliver syndrome 5 and 6; Adenine phosphoribosyltransferase deficiency; Adenylate kinase deficiency; hemolytic anemia due to Adenylosuccinate lyase deficiency; Adolescent nephronophthisis; Renal-hepatic-pancreatic dysplasia; Meckel syndrome type 7; Adrenoleukodystrophy; Adult junctional epidermolysis bullosa; Epidermolysis bullosa, junctional, localisata variant; Adult neuronal ceroid lipofuscinosis; Adult neuronal ceroid lipofuscinosis; Adult onset ataxia with oculomotor apraxia; ADULT syndrome; Afibrinogenemia and congenital Afibrinogenemia; autosomal recessive Agammaglobulinemia 2; Age-related macular degeneration 3, 6, 11, and 12; Aicardi Goutieres syndromes 1, 4, and 5; Chilbain lupus 1; Alagille syndromes 1 and 2; Alexander disease; Alkaptonuria; Allan-Herndon-Dudley syndrome; Alopecia universalis congenital; Alpers encephalopathy; Alpha-1-antitrypsin deficiency; autosomal dominant, autosomal recessive, and X-linked recessive Alport syndromes; Alzheimer disease, familial, 3, with spastic paraparesis and apraxia; Alzheimer disease, types, 1, 3, and 4; hypocalcification type and hypomaturation type, IIA1 Amelogenesis imperfecta; Aminoacylase 1 deficiency; Amish infantile epilepsy syndrome; Amyloidogenic transthyretin amyloidosis; Amyloid Cardiomyopathy, Transthyretin-related; Cardiomyopathy; Amyotrophic lateral sclerosis types 1, 6, 15 (with or without frontotemporal dementia), 22 (with or without frontotemporal dementia), and 10; Frontotemporal dementia with TDP43 inclusions, TARDBP-related; Andermann syndrome; Andersen Tawil syndrome; Congenital long QT syndrome; Anemia, nonspherocytic hemolytic, due to G6PD deficiency; Angelman syndrome; Severe neonatal-onset encephalopathy with microcephaly; susceptibility to Autism, X-linked 3; Angiopathy, hereditary, with nephropathy, aneurysms, and muscle cramps; Angiotensin i-converting enzyme, benign serum increase; Aniridia, cerebellar ataxia, and mental retardation; Anonychia; Antithrombin III deficiency; Antley-Bixler syndrome with genital anomalies and disordered steroidogenesis; Aortic aneurysm, familial thoracic 4, 6, and 9; Thoracic aortic aneurysms and aortic dissections; Multisystemic smooth muscle dysfunction syndrome; Moyamoya disease 5; Aplastic anemia; Apparent mineralocorticoid excess; Arginase deficiency; Argininosuccinate lyase deficiency; Aromatase deficiency; Arrhythmogenic right ventricular cardiomyopathy types 5, 8, and 10; Primary familial hypertrophic cardiomyopathy; Arthrogryposis multiplex congenita, distal, X-linked; Arthrogryposis renal dysfunction cholestasis syndrome; Arthrogryposis, renal dysfunction, and cholestasis 2; Asparagine synthetase deficiency; Abnormality of neuronal migration; Ataxia with vitamin E deficiency; Ataxia, sensory, autosomal dominant; Ataxia-telangiectasia syndrome; Hereditary cancer-predisposing syndrome; Atransferrinemia; Atrial fibrillation, familial, 11, 12, 13, and 16; Atrial septal defects 2, 4, and 7 (with or without atrioventricular conduction defects); Atrial standstill 2; Atrioventricular septal defect 4; Atrophia bulborum hereditaria; ATR-X syndrome; Auriculocondylar syndrome 2; Autoimmune disease, multisystem, infantile-onset; Autoimmune lymphoproliferative syndrome, type 1a; Autosomal dominant hypohidrotic ectodermal dysplasia; Autosomal dominant progressive external ophthalmoplegia with mitochondrial DNA deletions 1 and 3; Autosomal dominant torsion dystonia 4; Autosomal recessive centronuclear myopathy; Autosomal recessive congenital ichthyosis 1, 2, 3, 4A, and 4B; Autosomal recessive cutis laxa type IA and 1B; Autosomal recessive hypohidrotic ectodermal dysplasia syndrome; Ectodermal dysplasia 11b; hypohidrotic/hair/tooth type, autosomal recessive; Autosomal recessive hypophosphatemic bone disease; Axenfeld-Rieger syndrome type 3; Bainbridge-Ropers syndrome; Bannayan-Riley-Ruvalcaba syndrome; PTEN hamartoma tumor syndrome; Baraitser-Winter syndromes 1 and 2; Barakat syndrome; Bardet-Biedl syndromes 1, 11, 16, and 19; Bare lymphocyte syndrome type 2, complementation group E; Bartter syndrome antenatal type 2; Bartter syndrome types 3, 3 with hypocalciuria, and 4; Basal ganglia calcification, idiopathic, 4; Beaded hair; Benign familial hematuria; Benign familial neonatal seizures 1 and 2; Seizures, benign familial neonatal, 1, and/or myokymia; Seizures, Early infantile epileptic encephalopathy 7; Benign familial neonatal-infantile seizures; Benign hereditary chorea; Benign scapuloperoneal muscular dystrophy with cardiomyopathy; Bernard-Soulier syndrome, types A1 and A2 (autosomal dominant); Bestrophinopathy, autosomal recessive; beta Thalassemia; Bethlem myopathy and Bethlem myopathy 2; Bietti crystalline corneoretinal dystrophy; Bile acid synthesis defect, congenital, 2; Biotinidase deficiency; Birk Barel mental retardation dysmorphism syndrome; Blepharophimosis, ptosis, and epicanthus inversus; Bloom syndrome; Borjeson-Forssman-Lehmann syndrome; Boucher Neuhauser syndrome; Brachydactyly types A1 and A2; Brachydactyly with hypertension; Brain small vessel disease with hemorrhage; Branched-chain ketoacid dehydrogenase kinase deficiency; Branchiootic syndromes 2 and 3; Breast cancer, early-onset; Breast-ovarian cancer, familial 1, 2, and 4; Brittle cornea syndrome 2; Brody myopathy; Bronchiectasis with or without elevated sweat chloride 3; Brown-Vialetto-Van laere syndrome and Brown-Vialetto-Van Laere syndrome 2; Brugada syndrome; Brugada syndrome 1; Ventricular fibrillation; Paroxysmal familial ventricular fibrillation; Brugada syndrome and Brugada syndrome 4; Long QT syndrome; Sudden cardiac death; Bull eye macular dystrophy; Stargardt disease 4; Cone-rod dystrophy 12; Bullous ichthyosiform erythroderma; Burn-Mckeown syndrome; Candidiasis, familial, 2, 5, 6, and 8; Carbohydrate-deficient glycoprotein syndrome type I and II; Carbonic anhydrase VA deficiency, hyperammonemia due to; Carcinoma of colon; Cardiac arrhythmia; Long QT syndrome, LQT1 subtype; Cardioencephalomyopathy, fatal infantile, due to cytochrome c oxidase deficiency; Cardiofaciocutaneous syndrome; Cardiomyopathy; Danon disease; Hypertrophic cardiomyopathy; Left ventricular noncompaction cardiomyopathy; Carnevale syndrome; Carney complex, type 1; Carnitine acylcarnitine translocase deficiency; Carnitine palmitoyltransferase I, II, II (late onset), and II (infantile) deficiency; Cataract 1, 4, autosomal dominant, autosomal dominant, multiple types, with microcornea, coppock-like, juvenile, with microcornea and glucosuria, and nuclear diffuse nonprogressive; Catecholaminergic polymorphic ventricular tachycardia; Caudal regression syndrome; Cd8 deficiency, familial; Central core disease; Centromeric instability of chromosomes 1,9 and 16 and immunodeficiency; Cerebellar ataxia infantile with progressive external ophthalmoplegi and Cerebellar ataxia, mental retardation, and dysequilibrium syndrome 2; Cerebral amyloid angiopathy, APP-related; Cerebral autosomal dominant and recessive arteriopathy with subcortical infarcts and leukoencephalopathy; Cerebral cavernous malformations 2; Cerebrooculofacioskeletal syndrome 2; Cerebro-oculo-facio-skeletal syndrome; Cerebroretinal microangiopathy with calcifications and cysts; Ceroid lipofuscinosis neuronal 2, 6, 7, and 10; Ch\xc3\xa9diak-Higashi syndrome, Chediak-Higashi syndrome, adult type; Charcot-Marie-Tooth disease types 1B, 2B2, 2C, 2F, 2I, 2U (axonal), 1C (demyelinating), dominant intermediate C, recessive intermediate A, 2A2, 4C, 4D, 4H, IF, IVF, and X; Scapuloperoneal spinal muscular atrophy; Distal spinal muscular atrophy, congenital nonprogressive; Spinal muscular atrophy, distal, autosomal recessive, 5; CHARGE association; Childhood hypophosphatasia; Adult hypophosphatasia; Cholecystitis; Progressive familial intrahepatic cholestasis 3; Cholestasis, intrahepatic, of pregnancy 3; Cholestanol storage disease; Cholesterol monooxygenase (side-chain cleaving) deficiency; Chondrodysplasia Blomstrand type; Chondrodysplasia punctata 1, X-linked recessive and 2 X-linked dominant; CHOPS syndrome; Chronic granulomatous disease, autosomal recessive cytochrome b-positive, types 1 and 2; Chudley-McCullough syndrome; Ciliary dyskinesia, primary, 7, 11, 15, 20 and 22; Citrullinemia type I; Citrullinemia type I and II; Cleidocranial dysostosis; C-like syndrome; Cockayne syndrome type A; Coenzyme Q10 deficiency, primary 1, 4, and 7; Coffin Siris/Intellectual Disability; Coffin-Lowry syndrome; Cohen syndrome; Cold-induced sweating syndrome 1; COLE-CARPENTER SYNDROME 2; Combined cellular and humoral immune defects with granulomas; Combined d-2- and 1-2-hydroxyglutaric aciduria; Combined malonic and methylmalonic aciduria; Combined oxidative phosphorylation deficiencies 1, 3, 4, 12, 15, and 25; Combined partial and complete 17-alpha-hydroxylase/17,20-lyase deficiency; Common variable immunodeficiency 9; Complement component 4, partial deficiency of, due to dysfunctional c1 inhibitor; Complement factor B deficiency; Cone monochromatism; Cone-rod dystrophy 2 and 6; Cone-rod dystrophy amelogenesis imperfecta; Congenital adrenal hyperplasia and Congenital adrenal hypoplasia, X-linked; Congenital amegakaryocytic thrombocytopenia; Congenital aniridia; Congenital central hypoventilation; Hirschsprung disease 3; Congenital contractural arachnodactyly; Congenital contractures of the limbs and face, hypotonia, and developmental delay; Congenital disorder of glycosylation types 1B, 1D, 1G, 1H, 1J, 1K, 1N, 1P, 2C, 2J, 2K, IIm; Congenital dyserythropoietic anemia, type I and II; Congenital ectodermal dysplasia of face; Congenital erythropoietic porphyria; Congenital generalized lipodystrophy type 2; Congenital heart disease, multiple types, 2; Congenital heart disease; Interrupted aortic arch; Congenital lipomatous overgrowth, vascular malformations, and epidermal nevi; Non-small cell lung cancer; Neoplasm of ovary; Cardiac conduction defect, nonspecific; Congenital microvillous atrophy; Congenital muscular dystrophy; Congenital muscular dystrophy due to partial LAMA2 deficiency; Congenital muscular dystrophy-dystroglycanopathy with brain and eye anomalies, types A2, A7, A8, A11, and A14; Congenital muscular dystrophy-dystroglycanopathy with mental retardation, types B2, B3, B5, and B15; Congenital muscular dystrophy-dystroglycanopathy without mental retardation, type B5; Congenital muscular hypertrophy-cerebral syndrome; Congenital myasthenic syndrome, acetazolamide-responsive; Congenital myopathy with fiber type disproportion; Congenital ocular coloboma; Congenital stationary night blindness, type 1A, 1B, 1C, 1E, 1F, and 2A; Coproporphyria; Cornea plana 2; Corneal dystrophy, Fuchs endothelial, 4; Corneal endothelial dystrophy type 2; Corneal fragility keratoglobus, blue sclerae and joint hypermobility; Cornelia de Lange syndromes 1 and 5; Coronary artery disease, autosomal dominant 2; Coronary heart disease; Hyperalphalipoproteinemia 2; Cortical dysplasia, complex, with other brain malformations 5 and 6; Cortical malformations, occipital; Corticosteroid-binding globulin deficiency; Corticosterone methyloxidase type 2 deficiency; Costello syndrome; Cowden syndrome 1; Coxa plana; Craniodiaphyseal dysplasia, autosomal dominant; Craniosynostosis 1 and 4; Craniosynostosis and dental anomalies; Creatine deficiency, X-linked; Crouzon syndrome; Cryptophthalmos syndrome; Cryptorchidism, unilateral or bilateral; Cushing symphalangism; Cutaneous malignant melanoma 1; Cutis laxa with osteodystrophy and with severe pulmonary, gastrointestinal, and urinary abnormalities; Cyanosis, transient neonatal and atypical nephropathic; Cystic fibrosis; Cystinuria; Cytochrome c oxidase i deficiency; Cytochrome-c oxidase deficiency; D-2-hydroxyglutaric aciduria 2; Darier disease, segmental; Deafness with labyrinthine aplasia microtia and microdontia (LAMM); Deafness, autosomal dominant 3a, 4, 12, 13, 15, autosomal dominant nonsyndromic sensorineural 17, 20, and 65; Deafness, autosomal recessive 1A, 2, 3, 6, 8, 9, 12, 15, 16, 18b, 22, 28, 31, 44, 49, 63, 77, 86, and 89; Deafness, cochlear, with myopia and intellectual impairment, without vestibular involvement, autosomal dominant, X-linked 2; Deficiency of 2-methylbutyryl-CoA dehydrogenase; Deficiency of 3-hydroxyacyl-CoA dehydrogenase; Deficiency of alpha-mannosidase; Deficiency of aromatic-L-amino-acid decarboxylase; Deficiency of bisphosphoglycerate mutase; Deficiency of butyryl-CoA dehydrogenase; Deficiency of ferroxidase; Deficiency of galactokinase; Deficiency of guanidinoacetate methyltransferase; Deficiency of hyaluronoglucosaminidase; Deficiency of ribose-5-phosphate isomerase; Deficiency of steroid 11-beta-monooxygenase; Deficiency of UDPglucose-hexose-1-phosphate uridylyltransferase; Deficiency of xanthine oxidase; Dejerine-Sottas disease; Charcot-Marie-Tooth disease, types ID and IVF; Dejerine-Sottas syndrome, autosomal dominant; Dendritic cell, monocyte, B lymphocyte, and natural killer lymphocyte deficiency; Desbuquois dysplasia 2; Desbuquois syndrome; DFNA 2 Nonsyndromic Hearing Loss; Diabetes mellitus and insipidus with optic atrophy and deafness; Diabetes mellitus, type 2, and insulin-dependent, 20; Diamond-Blackfan anemia 1, 5, 8, and 10; Diarrhea 3 (secretory sodium, congenital, syndromic) and 5 (with tufting enteropathy, congenital); Dicarboxylic aminoaciduria; Diffuse palmoplantar keratoderma, Bothnian type; Digitorenocerebral syndrome; Dihydropteridine reductase deficiency; Dilated cardiomyopathy 1A, 1AA, 1C, 1G, 1BB, 1DD, 1FF, 1HH, 1I, 1KK, 1N, 1S, 1Y, and 3B; Left ventricular noncompaction 3; Disordered steroidogenesis due to cytochrome p450 oxidoreductase deficiency; Distal arthrogryposis type 2B; Distal hereditary motor neuronopathy type 2B; Distal myopathy Markesbery-Griggs type; Distal spinal muscular atrophy, X-linked 3; Distichiasis-lymphedema syndrome; Dominant dystrophic epidermolysis bullosa with absence of skin; Dominant hereditary optic atrophy; Donnai Barrow syndrome; Dopamine beta hydroxylase deficiency; Dopamine receptor d2, reduced brain density of; Dowling-degos disease 4; Doyne honeycomb retinal dystrophy; Malattia leventinese; Duane syndrome type 2; Dubin-Johnson syndrome; Duchenne muscular dystrophy; Becker muscular dystrophy; Dysfibrinogenemia; Dyskeratosis congenita autosomal dominant and autosomal dominant, 3; Dyskeratosis congenita, autosomal recessive, 1, 3, 4, and 5; Dyskeratosis congenita X-linked; Dyskinesia, familial, with facial myokymia; Dysplasminogenemia; Dystonia 2 (torsion, autosomal recessive), 3 (torsion, X-linked), 5 (Dopa-responsive type), 10, 12, 16, 25, 26 (Myoclonic); Seizures, benign familial infantile, 2; Early infantile epileptic encephalopathy 2, 4, 7, 9, 10, 11, 13, and 14; Atypical Rett syndrome; Early T cell progenitor acute lymphoblastic leukemia; Ectodermal dysplasia skin fragility syndrome; Ectodermal dysplasia-syndactyly syndrome 1; Ectopia lentis, isolated autosomal recessive and dominant; Ectrodactyly, ectodermal dysplasia, and cleft lip/palate syndrome 3; Ehlers-Danlos syndrome type 7 (autosomal recessive), classic type, type 2 (progeroid), hydroxylysine-deficient, type 4, type 4 variant, and due to tenascin-X deficiency; Eichsfeld type congenital muscular dystrophy; Endocrine-cerebroosteodysplasia; Enhanced s-cone syndrome; Enlarged vestibular aqueduct syndrome; Enterokinase deficiency; Epidermodysplasia verruciformis; Epidermolysa bullosa simplex and limb girdle muscular dystrophy, simplex with mottled pigmentation, simplex with pyloric atresia, simplex, autosomal recessive, and with pyloric atresia; Epidermolytic palmoplantar keratoderma; Familial febrile seizures 8; Epilepsy, childhood absence 2, 12 (idiopathic generalized, susceptibility to) 5 (nocturnal frontal lobe), nocturnal frontal lobe type 1, partial, with variable foci, progressive myoclonic 3, and X-linked, with variable learning disabilities and behavior disorders; Epileptic encephalopathy, childhood-onset, early infantile, 1, 19, 23, 25, 30, and 32; Epiphyseal dysplasia, multiple, with myopia and conductive deafness; Episodic ataxia type 2; Episodic pain syndrome, familial, 3; Epstein syndrome; Fechtner syndrome; Erythropoietic protoporphyria; Estrogen resistance; Exudative vitreoretinopathy 6; Fabry disease and Fabry disease, cardiac variant; Factor H, VII, X, v and factor viii, combined deficiency of 2, xiii, a subunit, deficiency; Familial adenomatous polyposis 1 and 3; Familial amyloid nephropathy with urticaria and deafness; Familial cold urticarial; Familial aplasia of the vermis; Familial benign pemphigus; Familial cancer of breast; Breast cancer, susceptibility to; Osteosarcoma; Pancreatic cancer 3; Familial cardiomyopathy; Familial cold autoinflammatory syndrome 2; Familial colorectal cancer; Familial exudative vitreoretinopathy, X-linked; Familial hemiplegic migraine types 1 and 2; Familial hypercholesterolemia; Familial hypertrophic cardiomyopathy 1, 2, 3, 4, 7, 10, 23 and 24; Familial hypokalemia-hypomagnesemia; Familial hypoplastic, glomerulocystic kidney; Familial infantile myasthenia; Familial juvenile gout; Familial Mediterranean fever and Familial mediterranean fever, autosomal dominant; Familial porencephaly; Familial porphyria cutanea tarda; Familial pulmonary capillary hemangiomatosis; Familial renal glucosuria; Familial renal hypouricemia; Familial restrictive cardiomyopathy 1; Familial type 1 and 3 hyperlipoproteinemia; Fanconi anemia, complementation group E, I, N, and O; Fanconi-Bickel syndrome; Favism, susceptibility to; Febrile seizures, familial, 11; Feingold syndrome 1; Fetal hemoglobin quantitative trait locus 1; FG syndrome and FG syndrome 4; Fibrosis of extraocular muscles, congenital, 1, 2, 3a (with or without extraocular involvement), 3b; Fish-eye disease; Fleck corneal dystrophy; Floating-Harbor syndrome; Focal epilepsy with speech disorder with or without mental retardation; Focal segmental glomerulosclerosis 5; Forebrain defects; Frank Ter Haar syndrome; Borrone Di Rocco Crovato syndrome; Frasier syndrome; Wilms tumor 1; Freeman-Sheldon syndrome; Frontometaphyseal dysplasia land 3; Frontotemporal dementia; Frontotemporal dementia and/or amyotrophic lateral sclerosis 3 and 4; Frontotemporal Dementia Chromosome 3-Linked and Frontotemporal dementia ubiquitin-positive; Fructose-biphosphatase deficiency; Fuhrmann syndrome; Gamma-aminobutyric acid transaminase deficiency; Gamstorp-Wohlfart syndrome; Gaucher disease type 1 and Subacute neuronopathic; Gaze palsy, familial horizontal, with progressive scoliosis; Generalized dominant dystrophic epidermolysis bullosa; Generalized epilepsy with febrile seizures plus 3, type 1, type 2; Epileptic encephalopathy Lennox-Gastaut type; Giant axonal neuropathy; Glanzmann thrombasthenia; Glaucoma 1, open angle, e, F, and G; Glaucoma 3, primary congenital, d; Glaucoma, congenital and Glaucoma, congenital, Coloboma; Glaucoma, primary open angle, juvenile-onset; Glioma susceptibility 1; Glucose transporter type 1 deficiency syndrome; Glucose-6-phosphate transport defect; GLUT1 deficiency syndrome 2; Epilepsy, idiopathic generalized, susceptibility to, 12; Glutamate formiminotransferase deficiency; Glutaric acidemia IIA and IIB; Glutaric aciduria, type 1; Gluthathione synthetase deficiency; Glycogen storage disease 0 (muscle), II (adult form), IXa2, IXc, type 1A; type II, type IV, IV (combined hepatic and myopathic), type V, and type VI; Goldmann-Favre syndrome; Gordon syndrome; Gorlin syndrome; Holoprosencephaly sequence; Holoprosencephaly 7; Granulomatous disease, chronic, X-linked, variant; Granulosa cell tumor of the ovary; Gray platelet syndrome; Griscelli syndrome type 3; Groenouw corneal dystrophy type I; Growth and mental retardation, mandibulofacial dysostosis, microcephaly, and cleft palate; Growth hormone deficiency with pituitary anomalies; Growth hormone insensitivity with immunodeficiency; GTP cyclohydrolase I deficiency; Hajdu-Cheney syndrome; Hand foot uterus syndrome; Hearing impairment; Hemangioma, capillary infantile; Hematologic neoplasm; Hemochromatosis type 1, 2B, and 3; Microvascular complications of diabetes 7; Transferrin serum level quantitative trait locus 2; Hemoglobin H disease, nondeletional; Hemolytic anemia, nonspherocytic, due to glucose phosphate isomerase deficiency; Hemophagocytic lymphohistiocytosis, familial, 2; Hemophagocytic lymphohistiocytosis, familial, 3; Heparin cofactor II deficiency; Hereditary acrodermatitis enteropathica; Hereditary breast and ovarian cancer syndrome; Ataxia-telangiectasia-like disorder; Hereditary diffuse gastric cancer; Hereditary diffuse leukoencephalopathy with spheroids; Hereditary factors II, IX, VIII deficiency disease; Hereditary hemorrhagic telangiectasia type 2; Hereditary insensitivity to pain with anhidrosis; Hereditary lymphedema type I; Hereditary motor and sensory neuropathy with optic atrophy; Hereditary myopathy with early respiratory failure; Hereditary neuralgic amyotrophy; Hereditary Nonpolyposis Colorectal Neoplasms; Lynch syndrome I and II; Hereditary pancreatitis; Pancreatitis, chronic, susceptibility to; Hereditary sensory and autonomic neuropathy type IIB amd IIA; Hereditary sideroblastic anemia; Hermansky-Pudlak syndrome 1, 3, 4, and 6; Heterotaxy, visceral, 2, 4, and 6, autosomal; Heterotaxy, visceral, X-linked; Heterotopia; Histiocytic medullary reticulosis; Histiocytosis-lymphadenopathy plus syndrome; Holocarboxylase synthetase deficiency; Holoprosencephaly 2, 3,7, and 9; Holt-Oram syndrome; Homocysteinemia due to MTHFR deficiency, CBS deficiency, and Homocystinuria, pyridoxine-responsive; Homocystinuria-Megaloblastic anemia due to defect in cobalamin metabolism, cblE complementation type; Howel-Evans syndrome; Hurler syndrome; Hutchinson-Gilford syndrome; Hydrocephalus; Hyperammonemia, type III; Hypercholesterolaemia and Hypercholesterolemia, autosomal recessive; Hyperekplexia 2 and Hyperekplexia hereditary; Hyperferritinemia cataract syndrome; Hyperglycinuria; Hyperimmunoglobulin D with periodic fever; Mevalonic aciduria; Hyperimmunoglobulin E syndrome; Hyperinsulinemic hypoglycemia familial 3, 4, and 5; Hyperinsulinism-hyperammonemia syndrome; Hyperlysinemia; Hypermanganesemia with dystonia, polycythemia and cirrhosis; Hyperornithinemia-hyperammonemia-homocitrullinuria syndrome; Hyperparathyroidism 1 and 2; Hyperparathyroidism, neonatal severe; Hyperphenylalaninemia, bh4-deficient, a, due to partial pts deficiency, BH4-deficient, D, and non-pku; Hyperphosphatasia with mental retardation syndrome 2, 3, and 4; Hypertrichotic osteochondrodysplasia; Hypobetalipoproteinemia, familial, associated with apob32; Hypocalcemia, autosomal dominant 1; Hypocalciuric hypercalcemia, familial, types 1 and 3; Hypochondrogenesis; Hypochromic microcytic anemia with iron overload; Hypoglycemia with deficiency of glycogen synthetase in the liver; Hypogonadotropic hypogonadism 11 with or without anosmia; Hypohidrotic ectodermal dysplasia with immune deficiency; Hypohidrotic X-linked ectodermal dysplasia; Hypokalemic periodic paralysis 1 and 2; Hypomagnesemia 1, intestinal; Hypomagnesemia, seizures, and mental retardation; Hypomyelinating leukodystrophy 7; Hypoplastic left heart syndrome; Atrioventricular septal defect and common atrioventricular junction; Hypospadias 1 and 2, X-linked; Hypothyroidism, congenital, nongoitrous, 1; Hypotrichosis 8 and 12; Hypotrichosis-lymphedema-telangiectasia syndrome; I blood group system; Ichthyosis bullosa of Siemens; Ichthyosis exfoliativa; Ichthyosis prematurity syndrome; Idiopathic basal ganglia calcification 5; Idiopathic fibrosing alveolitis, chronic form; Dyskeratosis congenita, autosomal dominant, 2 and 5; Idiopathic hypercalcemia of infancy; Immune dysfunction with T-cell inactivation due to calcium entry defect 2; Immunodeficiency 15, 16, 19, 30, 31C, 38, 40, 8, due to defect in cd3-zeta, with hyper IgM type 1 and 2, and X-Linked, with magnesium defect, Epstein-Barr virus infection, and neoplasia; Immunodeficiency-centromeric instability-facial anomalies syndrome 2; Inclusion body myopathy 2 and 3; Nonaka myopathy; Infantile convulsions and paroxysmal choreoathetosis, familial; Infantile cortical hyperostosis; Infantile GM1 agangliosidosis; Infantile hypophosphatasia; Infantile nephronophthisis; Infantile nystagmus, X-linked; Infantile Parkinsonism-dystonia; Infertility associated with multi-tailed spermatozoa and excessive DNA; Insulin resistance; Insulin-resistant diabetes mellitus and acanthosis nigricans; Insulin-dependent diabetes mellitus secretory diarrhea syndrome; Interstitial nephritis, karyomegalic; Intrauterine growth retardation, metaphyseal dysplasia, adrenal hypoplasia congenita, and genital anomalies; Iodotyrosyl coupling defect; IRAK4 deficiency; Iridogoniodysgenesis dominant type and type 1; Iron accumulation in brain; Ischiopatellar dysplasia; Islet cell hyperplasia; Isolated 17,20-lyase deficiency; Isolated lutropin deficiency; Isovaleryl-CoA dehydrogenase deficiency; Jankovic Rivera syndrome; Jervell and Lange-Nielsen syndrome 2; Joubert syndrome 1, 6, 7, 9/15 (digenic), 14, 16, and 17, and Orofaciodigital syndrome xiv; Junctional epidermolysis bullosa gravis of Herlitz; Juvenile GM>1< gangliosidosis; Juvenile polyposis syndrome; Juvenile polyposis/hereditary hemorrhagic telangiectasia syndrome; Juvenile retinoschisis; Kabuki make-up syndrome; Kallmann syndrome 1, 2, and 6; Delayed puberty; Kanzaki disease; Karak syndrome; Kartagener syndrome; Kenny-Caffey syndrome type 2; Keppen-Lubinsky syndrome; Keratoconus 1; Keratosis follicularis; Keratosis palmoplantaris striata 1; Kindler syndrome; L-2-hydroxyglutaric aciduria; Larsen syndrome, dominant type; Lattice corneal dystrophy Type III; Leber amaurosis; Zellweger syndrome; Peroxisome biogenesis disorders; Zellweger syndrome spectrum; Leber congenital amaurosis 11, 12, 13, 16, 4, 7, and 9; Leber optic atrophy; Aminoglycoside-induced deafness; Deafness, nonsyndromic sensorineural, mitochondrial; Left ventricular noncompaction 5; Left-right axis malformations; Leigh disease; Mitochondrial short-chain Enoyl-CoA Hydratase 1 deficiency; Leigh syndrome due to mitochondrial complex I deficiency; Leiner disease; Leri Weill dyschondrosteosis; Lethal congenital contracture syndrome 6; Leukocyte adhesion deficiency type I and III; Leukodystrophy, Hypomyelinating, 11 and 6; Leukoencephalopathy with ataxia, with Brainstem and Spinal Cord Involvement and Lactate Elevation, with vanishing white matter, and progressive, with ovarian failure; Leukonychia totalis; Lewy body dementia; Lichtenstein-Knorr Syndrome; Li-Fraumeni syndrome 1; Lig4 syndrome; Limb-girdle muscular dystrophy, type 1B, 2A, 2B, 2D, C1, C5, C9, C14; Congenital muscular dystrophy-dystroglycanopathy with brain and eye anomalies, type A14 and B14; Lipase deficiency combined; Lipid proteinosis; Lipodystrophy, familial partial, type 2 and 3; Lissencephaly 1, 2 (X-linked), 3, 6 (with microcephaly), X-linked; Subcortical laminar heterotopia, X-linked; Liver failure acute infantile; Loeys-Dietz syndrome 1, 2, 3; Long QT syndrome 1, 2, 2/9, 2/5, (digenic), 3, 5 and 5, acquired, susceptibility to; Lung cancer; Lymphedema, hereditary, id; Lymphedema, primary, with myelodysplasia; Lymphoproliferative syndrome 1, 1 (X-linked), and 2; Lysosomal acid lipase deficiency; Macrocephaly, macrosomia, facial dysmorphism syndrome; Macular dystrophy, vitelliform, adult-onset; Malignant hyperthermia susceptibility type 1; Malignant lymphoma, non-Hodgkin; Malignant melanoma; Malignant tumor of prostate; Mandibuloacral dysostosis; Mandibuloacral dysplasia with type A or B lipodystrophy, atypical; Mandibulofacial dysostosis, Treacher Collins type, autosomal recessive; Mannose-binding protein deficiency; Maple syrup urine disease type 1A and type 3; Marden Walker like syndrome; Marfan syndrome; Marinesco-Sj\xc3\xb6gren syndrome; Martsolf syndrome; Maturity-onset diabetes of the young, type 1, type 2, type 11, type 3, and type 9; May-Hegglin anomaly; MYH9 related disorders; Sebastian syndrome; McCune-Albright syndrome; Somatotroph adenoma; Sex cord-stromal tumor; Cushing syndrome; McKusick Kaufman syndrome; McLeod neuroacanthocytosis syndrome; Meckel-Gruber syndrome; Medium-chain acyl-coenzyme A dehydrogenase deficiency; Medulloblastoma; Megalencephalic leukoencephalopathy with subcortical cysts land 2a; Megalencephaly cutis marmorata telangiectatica congenital; PIK3CA Related Overgrowth Spectrum; Megalencephaly-polymicrogyria-polydactyly-hydrocephalus syndrome 2; Megaloblastic anemia, thiamine-responsive, with diabetes mellitus and sensorineural deafness; Meier-Gorlin syndromes land 4; Melnick-Needles syndrome; Meningioma; Mental retardation, X-linked, 3, 21, 30, and 72; Mental retardation and microcephaly with pontine and cerebellar hypoplasia; Mental retardation X-linked syndromic 5; Mental retardation, anterior maxillary protrusion, and strabismus; Mental retardation, autosomal dominant 12, 13, 15, 24, 3, 30, 4, 5, 6, and 9; Mental retardation, autosomal recessive 15, 44, 46, and 5; Mental retardation, stereotypic movements, epilepsy, and/or cerebral malformations; Mental retardation, syndromic, Claes-Jensen type, X-linked; Mental retardation, X-linked, nonspecific, syndromic, Hedera type, and syndromic, wu type; Merosin deficient congenital muscular dystrophy; Metachromatic leukodystrophy juvenile, late infantile, and adult types; Metachromatic leukodystrophy; Metatrophic dysplasia; Methemoglobinemia types I and 2; Methionine adenosyltransferase deficiency, autosomal dominant; Methylmalonic acidemia with homocystinuria; Methylmalonic aciduria cb1B type; Methylmalonic aciduria due to methylmalonyl-CoA mutase deficiency; METHYLMALONIC ACIDURIA, mut(0) TYPE; Microcephalic osteodysplastic primordial dwarfism type 2; Microcephaly with or without chorioretinopathy, lymphedema, or mental retardation; Microcephaly, hiatal hernia and nephrotic syndrome; Microcephaly; Hypoplasia of the corpus callosum; Spastic paraplegia 50, autosomal recessive; Global developmental delay; CNS hypomyelination; Brain atrophy; Microcephaly, normal intelligence and immunodeficiency; Microcephaly-capillary malformation syndrome; Microcytic anemia; Microphthalmia syndromic 5, 7, and 9; Microphthalmia, isolated 3, 5, 6, 8, and with coloboma 6; Microspherophakia; Migraine, familial basilar; Miller syndrome; Minicore myopathy with external ophthalmoplegia; Myopathy, congenital with cores; Mitchell-Riley syndrome; mitochondrial 3-hydroxy-3-methylglutaryl-CoA synthase deficiency; Mitochondrial complex I, II, III, III (nuclear type 2, 4, or 8) deficiency; Mitochondrial DNA depletion syndrome 11, 12 (cardiomyopathic type), 2, 4B (MNGIE type), 8B (MNGIE type); Mitochondrial DNA-depletion syndrome 3 and 7, hepatocerebral types, and 13 (encephalomyopathic type); Mitochondrial phosphate carrier and pyruvate carrier deficiency; Mitochondrial trifunctional protein deficiency; Long-chain 3-hydroxyacyl-CoA dehydrogenase deficiency; Miyoshi muscular dystrophy 1; Myopathy, distal, with anterior tibial onset; Mohr-Tranebjaerg syndrome; Molybdenum cofactor deficiency, complementation group A; Mowat-Wilson syndrome; Mucolipidosis III Gamma; Mucopolysaccharidosis type VI, type VI (severe), and type VII; Mucopolysaccharidosis, MPS-I-H/S, MPS-II, MPS-III-A, MPS-III-B, MPS-III-C, MPS-IV-A, MPS-IV-B; Retinitis Pigmentosa 73; Gangliosidosis GM1 typel (with cardiac involvement) 3; Multicentric osteolysis nephropathy; Multicentric osteolysis, nodulosis and arthropathy; Multiple congenital anomalies; Atrial septal defect 2; Multiple congenital anomalies-hypotonia-seizures syndrome 3; Multiple Cutaneous and Mucosal Venous Malformations; Multiple endocrine neoplasia, types land 4; Multiple epiphyseal dysplasia 5 or Dominant; Multiple gastrointestinal atresias; Multiple pterygium syndrome Escobar type; Multiple sulfatase deficiency; Multiple synostoses syndrome 3; Muscle AMP guanine oxidase deficiency; Muscle eye brain disease; Muscular dystrophy, congenital, megaconial type; Myasthenia, familial infantile, 1; Myasthenic Syndrome, Congenital, 11, associated with acetylcholine receptor deficiency; Myasthenic Syndrome, Congenital, 17, 2A (slow-channel), 4B (fast-channel), and without tubular aggregates; Myeloperoxidase deficiency; MYH-associated polyposis; Endometrial carcinoma; Myocardial infarction 1; Myoclonic dystonia; Myoclonic-Atonic Epilepsy; Myoclonus with epilepsy with ragged red fibers; Myofibrillar myopathy 1 and ZASP-related; Myoglobinuria, acute recurrent, autosomal recessive; Myoneural gastrointestinal encephalopathy syndrome; Cerebellar ataxia infantile with progressive external ophthalmoplegia; Mitochondrial DNA depletion syndrome 4B, MNGIE type; Myopathy, centronuclear, 1, congenital, with excess of muscle spindles, distal, 1, lactic acidosis, and sideroblastic anemia 1, mitochondrial progressive with congenital cataract, hearing loss, and developmental delay, and tubular aggregate, 2; Myopia 6; Myosclerosis, autosomal recessive; Myotonia congenital; Congenital myotonia, autosomal dominant and recessive forms; Nail-patella syndrome; Nance-Horan syndrome; Nanophthalmos 2; Navajo neurohepatopathy; Nemaline myopathy 3 and 9; Neonatal hypotonia; Intellectual disability; Seizures; Delayed speech and language development; Mental retardation, autosomal dominant 31; Neonatal intrahepatic cholestasis caused by citrin deficiency; Nephrogenic diabetes insipidus, Nephrogenic diabetes insipidus, X-linked; Nephrolithiasis/osteoporosis, hypophosphatemic, 2; Nephronophthisis 13, 15 and 4; Infertility; Cerebello-oculo-renal syndrome (nephronophthisis, oculomotor apraxia and cerebellar abnormalities); Nephrotic syndrome, type 3, type 5, with or without ocular abnormalities, type 7, and type 9; Nestor-Guillermo progeria syndrome; Neu-Laxova syndrome 1; Neurodegeneration with brain iron accumulation 4 and 6; Neuroferritinopathy; Neurofibromatosis, type land type 2; Neurofibrosarcoma; Neurohypophyseal diabetes insipidus; Neuropathy, Hereditary Sensory, Type IC; Neutral 1 amino acid transport defect; Neutral lipid storage disease with myopathy; Neutrophil immunodeficiency syndrome; Nicolaides-Baraitser syndrome; Niemann-Pick disease type C1, C2, type A, and type C1, adult form; Non-ketotic hyperglycinemia; Noonan syndrome 1 and 4a, LEOPARD syndrome 1; Noonan syndrome-like disorder with or without juvenile myelomonocytic leukemia; Normokalemic periodic paralysis, potassium-sensitive; Norum disease; Epilepsy, Hearing Loss, And Mental Retardation Syndrome; Mental Retardation, X-Linked 102 and syndromic 13; Obesity; Ocular albinism, type I; Oculocutaneous albinism type 1B, type 3, and type 4; Oculodentodigital dysplasia; Odontohypophosphatasia; Odontotrichomelic syndrome; Oguchi disease; Oligodontia-colorectal cancer syndrome; Opitz G/BBB syndrome; Optic atrophy 9; Oral-facial-digital syndrome; Ornithine aminotransferase deficiency; Orofacial cleft 11 and 7, Cleft lip/palate-ectodermal dysplasia syndrome; Orstavik Lindemann Solberg syndrome; Osteoarthritis with mild chondrodysplasia; Osteochondritis dissecans; Osteogenesis imperfecta type 12, type 5, type 7, type 8, type I, type III, with normal sclerae, dominant form, recessive perinatal lethal; Osteopathia striata with cranial sclerosis; Osteopetrosis autosomal dominant type 1 and 2, recessive 4, recessive 1, recessive 6a; Osteoporosis with pseudoglioma; Oto-palato-digital syndrome, types I and II; Ovarian dysgenesis 1; Ovarioleukodystrophy; Pachyonychia congenita 4 and type 2; Paget disease of bone, familial; Pallister-Hall syndrome; Palmoplantar keratoderma, nonepidermolytic, focal or diffuse; Pancreatic agenesis and congenital heart disease; Papillon-Lef\xc3\xa8vre syndrome; Paragangliomas 3; Paramyotonia congenita of von Eulenburg; Parathyroid carcinoma; Parkinson disease 14, 15, 19 (juvenile-onset), 2, 20 (early-onset), 6, (autosomal recessive early-onset, and 9; Partial albinism; Partial hypoxanthine-guanine phosphoribosyltransferase deficiency; Patterned dystrophy of retinal pigment epithelium; PC-K6a; Pelizaeus-Merzbacher disease; Pendred syndrome; Peripheral demyelinating neuropathy, central dysmyelination; Hirschsprung disease; Permanent neonatal diabetes mellitus; Diabetes mellitus, permanent neonatal, with neurologic features; Neonatal insulin-dependent diabetes mellitus; Maturity-onset diabetes of the young, type 2; Peroxisome biogenesis disorder 14B, 2A, 4A, 5B, 6A, 7A, and 7B; Perrault syndrome 4; Perry syndrome; Persistent hyperinsulinemic hypoglycemia of infancy; familial hyperinsulinism; Phenotypes; Phenylketonuria; Pheochromocytoma; Hereditary Paraganglioma-Pheochromocytoma Syndromes; Paragangliomas 1; Carcinoid tumor of intestine; Cowden syndrome 3; Phosphoglycerate dehydrogenase deficiency; Phosphoglycerate kinase 1 deficiency; Photosensitive trichothiodystrophy; Phytanic acid storage disease; Pick disease; Pierson syndrome; Pigmentary retinal dystrophy; Pigmented nodular adrenocortical disease, primary, 1; Pilomatrixoma; Pitt-Hopkins syndrome; Pituitary dependent hypercortisolism; Pituitary hormone deficiency, combined 1, 2, 3, and 4; Plasminogen activator inhibitor type 1 deficiency; Plasminogen deficiency, type I; Platelet-type bleeding disorder 15 and 8; Poikiloderma, hereditary fibrosing, with tendon contractures, myopathy, and pulmonary fibrosis; Polycystic kidney disease 2, adult type, and infantile type; Polycystic lipomembranous osteodysplasia with sclerosing leukoencephalopathy; Polyglucosan body myopathy 1 with or without immunodeficiency; Polymicrogyria, asymmetric, bilateral frontoparietal; Polyneuropathy, hearing loss, ataxia, retinitis pigmentosa, and cataract; Pontocerebellar hypoplasia type 4; Popliteal pterygium syndrome; Porencephaly 2; Porokeratosis 8, disseminated superficial actinic type; Porphobilinogen synthase deficiency; Porphyria cutanea tarda; Posterior column ataxia with retinitis pigmentosa; Posterior polar cataract type 2; Prader-Willi-like syndrome; Premature ovarian failure 4, 5, 7, and 9; Primary autosomal recessive microcephaly 10, 2, 3, and 5; Primary ciliary dyskinesia 24; Primary dilated cardiomyopathy; Left ventricular noncompaction 6; 4, Left ventricular noncompaction 10; Paroxysmal atrial fibrillation; Primary hyperoxaluria, type I, type, and type III; Primary hypertrophic osteoarthropathy, autosomal recessive 2; Primary hypomagnesemia; Primary open angle glaucoma juvenile onset 1; Primary pulmonary hypertension; Primrose syndrome; Progressive familial heart block type 1B; Progressive familial intrahepatic cholestasis 2 and 3; Progressive intrahepatic cholestasis; Progressive myoclonus epilepsy with ataxia; Progressive pseudorheumatoid dysplasia; Progressive sclerosing poliodystrophy; Prolidase deficiency; Proline dehydrogenase deficiency; Schizophrenia 4; Properdin deficiency, X-linked; Propionic academia; Proprotein convertase 1/3 deficiency; Prostate cancer, hereditary, 2; Protan defect; Proteinuria; Finnish congenital nephrotic syndrome; Proteus syndrome; Breast adenocarcinoma; Pseudoachondroplastic spondyloepiphyseal dysplasia syndrome; Pseudohypoaldosteronism type 1 autosomal dominant and recessive and type 2; Pseudohypoparathyroidism type 1A, Pseudopseudohypoparathyroidism; Pseudoneonatal adrenoleukodystrophy; Pseudoprimary hyperaldosteronism; Pseudoxanthoma elasticum; Generalized arterial calcification of infancy 2; Pseudoxanthoma elasticum-like disorder with multiple coagulation factor deficiency; Psoriasis susceptibility 2; PTEN hamartoma tumor syndrome; Pulmonary arterial hypertension related to hereditary hemorrhagic telangiectasia; Pulmonary Fibrosis And/Or Bone Marrow Failure, Telomere-Related, 1 and 3; Pulmonary hypertension, primary, 1, with hereditary hemorrhagic telangiectasia; Purine-nucleoside phosphorylase deficiency; Pyruvate carboxylase deficiency; Pyruvate dehydrogenase E1-alpha deficiency; Pyruvate kinase deficiency of red cells; Raine syndrome; Rasopathy; Recessive dystrophic epidermolysis bullosa; Nail disorder, nonsyndromic congenital, 8; Reifenstein syndrome; Renal adysplasia; Renal carnitine transport defect; Renal coloboma syndrome; Renal dysplasia; Renal dysplasia, retinal pigmentary dystrophy, cerebellar ataxia and skeletal dysplasia; Renal tubular acidosis, distal, autosomal recessive, with late-onset sensorineural hearing loss, or with hemolytic anemia; Renal tubular acidosis, proximal, with ocular abnormalities and mental retardation; Retinal cone dystrophy 3B; Retinitis pigmentosa; Retinitis pigmentosa 10, 11, 12, 14, 15, 17, and 19; Retinitis pigmentosa 2, 20, 25, 35, 36, 38, 39, 4, 40, 43, 45, 48, 66, 7, 70, 72; Retinoblastoma; Rett disorder; Rhabdoid tumor predisposition syndrome 2; Rhegmatogenous retinal detachment, autosomal dominant; Rhizomelic chondrodysplasia punctata type 2 and type 3; Roberts-SC phocomelia syndrome; Robinow Sorauf syndrome; Robinow syndrome, autosomal recessive, autosomal recessive, with brachy-syn-polydactyly; Rothmund-Thomson syndrome; Rapadilino syndrome; RRM2B-related mitochondrial disease; Rubinstein-Taybi syndrome; Salla disease; Sandhoff disease, adult and infantil types; Sarcoidosis, early-onset; Blau syndrome; Schindler disease, type 1; Schizencephaly; Schizophrenia 15; Schneckenbecken dysplasia; Schwannomatosis 2; Schwartz Jampel syndrome type 1; Sclerocornea, autosomal recessive; Sclerosteosis; Secondary hypothyroidism; Segawa syndrome, autosomal recessive; Senior-Loken syndrome 4 and 5; Sensory ataxic neuropathy, dysarthria, and ophthalmoparesis; Sepiapterin reductase deficiency; SeSAME syndrome; Severe combined immunodeficiency due to ADA deficiency, with microcephaly, growth retardation, and sensitivity to ionizing radiation, atypical, autosomal recessive, T cell-negative, B cell-positive, NK cell-negative of NK-positive; Severe congenital neutropenia; Severe congenital neutropenia 3, autosomal recessive or dominant; Severe congenital neutropenia and 6, autosomal recessive; Severe myoclonic epilepsy in infancy; Generalized epilepsy with febrile seizures plus, types 1 and 2; Severe X-linked myotubular myopathy; Short QT syndrome 3; Short stature with nonspecific skeletal abnormalities; Short stature, auditory canal atresia, mandibular hypoplasia, skeletal abnormalities; Short stature, onychodysplasia, facial dysmorphism, and hypotrichosis; Primordial dwarfism; Short-rib thoracic dysplasia 11 or 3 with or without polydactyly; Sialidosis type I and II; Silver spastic paraplegia syndrome; Slowed nerve conduction velocity, autosomal dominant; Smith-Lemli-Opitz syndrome; Snyder Robinson syndrome; Somatotroph adenoma; Prolactinoma; familial, Pituitary adenoma predisposition; Sotos syndrome 1 or 2; Spastic ataxia 5, autosomal recessive, Charlevoix-Saguenay type, 1,10, or 11, autosomal recessive; Amyotrophic lateral sclerosis type 5; Spastic paraplegia 15, 2, 3, 35, 39, 4, autosomal dominant, 55, autosomal recessive, and 5A; Bile acid synthesis defect, congenital, 3; Spermatogenic failure 11, 3, and 8; Spherocytosis types 4 and 5; Spheroid body myopathy; Spinal muscular atrophy, lower extremity predominant 2, autosomal dominant; Spinal muscular atrophy, type II; Spinocerebellar ataxia 14, 21, 35, 40, and 6; Spinocerebellar ataxia autosomal recessive 1 and 16; Splenic hypoplasia; Spondylocarpotarsal synostosis syndrome; Spondylocheirodysplasia, Ehlers-Danlos syndrome-like, with immune dysregulation, Aggrecan type, with congenital joint dislocations, short limb-hand type, Sedaghatian type, with cone-rod dystrophy, and Kozlowski type; Parastremmatic dwarfism; Stargardt disease 1; Cone-rod dystrophy 3; Stickler syndrome type 1; Kniest dysplasia; Stickler syndrome, types 1(nonsyndromic ocular) and 4; Sting-associated vasculopathy, infantile-onset; Stormorken syndrome; Sturge-Weber syndrome, Capillary malformations, congenital, 1; Succinyl-CoA acetoacetate transferase deficiency; Sucrase-isomaltase deficiency; Sudden infant death syndrome; Sulfite oxidase deficiency, isolated; Supravalvar aortic stenosis; Surfactant metabolism dysfunction, pulmonary, 2 and 3; Symphalangism, proximal, lb; Syndactyly Cenani Lenz type; Syndactyly type 3; Syndromic X-linked mental retardation 16; Talipes equinovarus; Tangier disease; TARP syndrome; Tay-Sachs disease, B1 variant, Gm2-gangliosidosis (adult), Gm2-gangliosidosis (adult-onset); Temtamy syndrome; Tenorio Syndrome; Terminal osseous dysplasia; Testosterone 17-beta-dehydrogenase deficiency; Tetraamelia, autosomal recessive; Tetralogy of Fallot; Hypoplastic left heart syndrome 2; Truncus arteriosus; Malformation of the heart and great vessels; Ventricular septal defect 1; Thiel-Behnke corneal dystrophy; Thoracic aortic aneurysms and aortic dissections; Marfanoid habitus; Three M syndrome 2; Thrombocytopenia, platelet dysfunction, hemolysis, and imbalanced globin synthesis; Thrombocytopenia, X-linked; Thrombophilia, hereditary, due to protein C deficiency, autosomal dominant and recessive; Thyroid agenesis; Thyroid cancer, follicular; Thyroid hormone metabolism, abnormal; Thyroid hormone resistance, generalized, autosomal dominant; Thyrotoxic periodic paralysis and Thyrotoxic periodic paralysis 2; Thyrotropin-releasing hormone resistance, generalized; Timothy syndrome; TNF receptor-associated periodic fever syndrome (TRAPS); Tooth agenesis, selective, 3 and 4; Torsades de pointes; Townes-Brocks-branchiootorenal-like syndrome; Transient bullous dermolysis of the newborn; Treacher collins syndrome 1; Trichomegaly with mental retardation, dwarfism and pigmentary degeneration of retina; Trichorhinophalangeal dysplasia type I; Trichorhinophalangeal syndrome type 3; Trimethylaminuria; Tuberous sclerosis syndrome; Lymphangiomyomatosis; Tuberous sclerosis 1 and 2; Tyrosinase-negative oculocutaneous albinism; Tyrosinase-positive oculocutaneous albinism; Tyrosinemia type I; UDPglucose-4-epimerase deficiency; Ullrich congenital muscular dystrophy; Ulna and fibula absence of with severe limb deficiency; Upshaw-Schulman syndrome; Urocanate hydratase deficiency; Usher syndrome, types 1, 1B, 1D, 1G, 2A, 2C, and 2D; Retinitis pigmentosa 39; UV-sensitive syndrome; Van der Woude syndrome; Van Maldergem syndrome 2; Hennekam lymphangiectasia-lymphedema syndrome 2; Variegate porphyria; Ventriculomegaly with cystic kidney disease; Verheij syndrome; Very long chain acyl-CoA dehydrogenase deficiency; Vesicoureteral reflux 8; Visceral heterotaxy 5, autosomal; Visceral myopathy; Vitamin D-dependent rickets, types land 2; Vitelliform dystrophy; von Willebrand disease type 2M and type 3; Waardenburg syndrome type 1, 4C, and 2E (with neurologic involvement); Klein-Waardenberg syndrome; Walker-Warburg congenital muscular dystrophy; Warburg micro syndrome 2 and 4; Warts, hypogammaglobulinemia, infections, and myelokathexis; Weaver syndrome; Weill-Marchesani syndrome 1 and 3; Weill-Marchesani-like syndrome; Weissenbacher-Zweymuller syndrome; Werdnig-Hoffmann disease; Charcot-Marie-Tooth disease; Werner syndrome; WFS1-Related Disorders; Wiedemann-Steiner syndrome; Wilson disease; Wolfram-like syndrome, autosomal dominant; Worth disease; Van Buchem disease type 2; Xeroderma pigmentosum, complementation group b, group D, group E, and group G; X-linked agammaglobulinemia; X-linked hereditary motor and sensory neuropathy; X-linked ichthyosis with steryl-sulfatase deficiency; X-linked periventricular heterotopia; Oto-palato-digital syndrome, type I; X-linked severe combined immunodeficiency; Zimmermann-Laband syndrome and Zimmermann-Laband syndrome 2; and Zonular pulverulent cataract 3.

[1083] The target nucleotide sequence may comprise a target sequence (e.g., a point mutation) associated with a disease, disorder, or condition. The target sequence may comprise a T to C (or A to G) point mutation associated with a disease, disorder, or condition, and wherein the deamination of the mutant C base results in mismatch repair-mediated correction to a sequence that is not associated with a disease, disorder, or condition. The target sequence may comprise a G to A (or C to T) point mutation associated with a disease, disorder, or condition, and wherein the deamination of the mutant A base results in mismatch repair-mediated correction to a sequence that is not associated with a disease, disorder, or condition. The target sequence may encode a protein, and where the point mutation is in a codon and results in a change in the amino acid encoded by the mutant codon as compared to a wild-type codon. The target sequence may also be at a splice site, and the point mutation results in a change in the splicing of an mRNA transcript as compared to a wild-type transcript. In addition, the target may be at a non-coding sequence of a gene, such as a promoter, and the point mutation results in increased or decreased expression of the gene.

[1084] Thus, in some aspects, the deamination of a mutant C results in a change of the amino acid encoded by the mutant codon, which in some cases can result in the expression of a wild-type amino acid. In other aspects, the deamination of a mutant A results in a change of the amino acid encoded by the mutant codon, which in some cases can result in the expression of a wild-type amino acid.

[1085] The methods described herein involving contacting a cell with a composition or rAAV particle can occur in vitro, ex vivo, or in vivo. In certain embodiments, the step of contacting occurs in a subject. In certain embodiments, the subject has been diagnosed with a disease, disorder, or condition.

[1086] In some embodiments, the methods disclosed herein involve contacting a mammalian cell with a composition or rAAV particle. In particular embodiments, the methods involve contacting a retinal cell, cortical cell or cerebellar cell.

[1087] The split Cas9 protein or split prime editor delivered using the methods described herein preferably have comparable activity compared to the original Cas9 protein or prime editor (i.e., unsplit protein delivered to a cell or expressed in a cell as a whole). For example, the split Cas9 protein or split prime editor retains at least 50% (e.g., at least 50%, at least 60%, at least 70%, at least 80%, at least 90%, at least 95%, at least 98%, at least 99%, or 100%) of the activity of the original Cas9 protein or prime editor. In some embodiments, the split Cas9 protein or split prime editor is more active (e.g., 2-fold, 5-fold, 10-fold, 100-fold, 1000-fold, or more) than that of an original Cas9 protein or prime editor.

[1088] The compositions described herein may be administered to a subject in need thereof in a therapeutically effective amount to treat and/or prevent a disease or disorder the subject is suffering from. Any disease or disorder that maybe treated and/or prevented using CRISPR/Cas9-based genome-editing technology may be treated by the split Cas9 protein or the split prime editor described herein. It is to be understood that, if the nucleotide sequences encoding the split Cas9 protein or the prime editor does not further encode a gRNA, a separate nucleic acid vector encoding the gRNA may be administered together with the compositions described herein.

[1089] Exemplary suitable diseases, disorders or conditions include, without limitation the disease or disorder is selected from the group consisting of: cystic fibrosis, phenylketonuria, epidermolytic hyperkeratosis (EHK), chronic obstructive pulmonary disease (COPD), Charcot-Marie-Toot disease type 4J, neuroblastoma (NB), von Willebrand disease (vWD), myotonia congenital, hereditary renal amyloidosis, dilated cardiomyopathy, hereditary lymphedema, familial Alzheimer's disease, prion disease, chronic infantile neurologic cutaneous articular syndrome (CINCA), congenital deafness, Niemann-Pick disease type C (NPC) disease, and desmin-related myopathy (DRM). In particular embodiments, the disease or condition is Niemann-Pick disease type C (NPC) disease.

[1090] In some embodiments, the disease, disorder or condition is associated with a point mutation in an NPC gene, a DNMT1 gene, a PCSK9 gene, or a TMC1 gene. In certain embodiments, the point mutation is a T3182C mutation in NPC, which results in an I1061T amino acid substitution.

[1091] In certain embodiments, the point mutation is an A545G mutation in TMC1, which results in a Y182C amino acid substitution. TMC1 encodes a protein that forms mechanosensitive ion channels in sensory hair cells of the inner ear and is required for normal auditory function. The Y182C amino acid substitution is associated with congenital deafness.

[1092] In some embodiments, the disease, disorder or condition is associated with a point mutation that generates a stop codon, for example, a premature stop codon within the coding region of a gene.

[1093] Additional exemplary diseases, disorders and conditions include cystic fibrosis (see, e.g., Schwank et al., Functional repair of CFTR by CRISPR/Cas9 in intestinal stem cell organoids of cystic fibrosis patients. Cell stem cell. 2013; 13: 653-658; and Wu et. al., Correction of a genetic disease in mouse via use of CRISPR-Cas9. Cell stem cell. 2013; 13: 659-662, neither of which uses a deaminase fusion protein to correct the genetic defect); phenylketonuria—e.g., phenylalanine to serine mutation at position 835 (mouse) or 240 (human) or a homologous residue in phenylalanine hydroxylase gene (T>C mutation)—see, e.g., McDonald et al., Genomics. 1997; 39:402-405; Bernard-Soulier syndrome (BSS)—e.g., phenylalanine to serine mutation at position 55 or a homologous residue, or cysteine to arginine at residue 24 or a homologous residue in the platelet membrane glycoprotein IX (T>C mutation)—see, e.g., Noris et al., British Journal of Haematology. 1997; 97: 312-320, and Ali et al., Hematol. 2014; 93: 381-384; epidermolytic hyperkeratosis (EHK)—e.g., leucine to proline mutation at position 160 or 161 (if counting the initiator methionine) or a homologous residue in keratin 1 (T>C mutation)—see, e.g., Chipev et al., Cell. 1992; 70: 821-828, see also accession number P04264 in the UNIPROT database at www[dot]uniprot[dot]org; chronic obstructive pulmonary disease (COPD)—e.g., leucine to proline mutation at position 54 or 55 (if counting the initiator methionine) or a homologous residue in the processed form of α₁-antitrypsin or residue 78 in the unprocessed form or a homologous residue (T>C mutation)—see, e.g., Poller et al., Genomics. 1993; 17: 740-743, see also accession number P01011 in the UNIPROT database; Charcot-Marie-Toot disease type 4J—e.g., isoleucine to threonine mutation at position 41 or a homologous residue in FIG. 4 (T>C mutation)—see, e.g., Lenk et al., PLoS Genetics. 2011; 7: e1002104; neuroblastoma (NB)—e.g., leucine to proline mutation at position 197 or a homologous residue in Caspase-9 (T>C mutation)—see, e.g., Kundu et al., 3 Biotech. 2013, 3:225-234; von Willebrand disease (vWD)—e.g., cysteine to arginine mutation at position 509 or a homologous residue in the processed form of von Willebrand factor, or at position 1272 or a homologous residue in the unprocessed form of von Willebrand factor (T>C mutation)—see, e.g., Lavergne et al., Br. J. Haematol. 1992, see also accession number P04275 in the UNIPROT database; 82: 66-72; myotonia congenital—e.g., cysteine to arginine mutation at position 277 or a homologous residue in the muscle chloride channel gene CLCN1 (T>C mutation)—see, e.g., Weinberger et al., The J. of Physiology. 2012; 590: 3449-3464; hereditary renal amyloidosis—e.g., stop codon to arginine mutation at position 78 or a homologous residue in the processed form of apolipoprotein All or at position 101 or a homologous residue in the unprocessed form (T>C mutation)—see, e.g., Yazaki et al., Kidney Int. 2003; 64: 11-16; dilated cardiomyopathy (DCM)—e.g., tryptophan to Arginine mutation at position 148 or a homologous residue in the FOXD4 gene (T>C mutation), see, e.g., Minoretti et. al., Int. J. of Mol. Med. 2007; 19: 369-372; hereditary lymphedema—e.g., histidine to arginine mutation at position 1035 or a homologous residue in VEGFR3 tyrosine kinase (A>G mutation), see, e.g., Irrthum et al., Am. J. Hum. Genet. 2000; 67: 295-301; familial Alzheimer's disease—e.g., isoleucine to valine mutation at position 143 or a homologous residue in presenilinl (A>G mutation), see, e.g., Gallo et. al., J. Alzheimer's disease. 2011; 25: 425-431; Prion disease—e.g., methionine to valine mutation at position 129 or a homologous residue in prion protein (A>G mutation)—see, e.g., Lewis et. al., J. of General Virology. 2006; 87: 2443-2449; chronic infantile neurologic cutaneous articular syndrome (CINCA)—e.g., Tyrosine to Cysteine mutation at position 570 or a homologous residue in cryopyrin (A>G mutation)—see, e.g., Fujisawa et. al. Blood. 2007; 109: 2903-2911; and desmin-related myopathy (DRM)—e.g., arginine to glycine mutation at position 120 or a homologous residue in αβ crystallin (A>G mutation)—see, e.g., Kumar et al., J. Biol. Chem. 1999; 274: 24137-24141. The entire contents of all references and database entries is incorporated herein by reference.

### Trinucleotide Repeat Expansion Disease

[1094] Trinucleotide repeat expansion is associated with a number of human diseases, including Huntington's Disease, Fragile X syndrome, and Friedreich's ataxia. The most common trinucleotide repeat contains CAG triplets, though GAA triplets (Friedreich's ataxia) and CGG triplets (Fragile X syndrome) also occur. Inheriting a predisposition to expansion, or acquiring an already expanded parental allele, increases the likelihood of acquiring the disease. Pathogenic expansions of trinucleotide repeats could hypothetically be corrected using prime editing.

[1095] A region upstream of the repeat region can be nicked by an RNA-guided nuclease, then used to prime synthesis of a new DNA strand that contains a healthy number of repeats (which depends on the particular gene and disease), in accordance with the general mechanism outlined in FIG. 1G or FIG. 22. After the repeat sequence, a short stretch of homology is added that matches the identity of the sequence adjacent to the other end of the repeat (bold strand). Invasion of the newly synthesized strand by the TPRT system, and subsequent replacement of the endogenous DNA with the newly synthesized flap, leads to a contracted repeat allele. The term “contracted” refers to a shortening of the length of the nucleotide repeat region, thereby resulting in repairing the trinucleotide repeat region.

[1096] The prime editing system or prime editing (PE) system described herein may be used to contract trinucleotide repeat mutations (or “triplet expansion diseases”) to treating conditions such as Huntington's disease and other trinucleotide repeat disorders. Trinucleotide repeat expansion disorders are complex, progressive disorders that involve developmental neurobiology and often affect cognition as well as sensori-motor functions. The disorders show genetic anticipation (i.e. increased severity with each generation). The DNA expansions or contractions usually happen meiotically (i.e. during the time of gametogenesis, or early in embryonic development), and often have sex-bias meaning that some genes expand only when inherited through the female, others only through the male. In humans, trinucleotide repeat expansion disorders can cause gene silencing at either the transcriptional or translational level, which essentially knocks out gene function. Alternatively, trinucleotide repeat expansion disorders can cause altered proteins generated with large repetitive amino acid sequences that either abrogate or change protein function, often in a dominant-negative manner (e.g. poly-glutamine diseases).

[1097] Without wishing to be bound by theory, triplet expansion is caused by slippage during DNA replication or during DNA repair synthesis. Because the tandem repeats have identical sequence to one another, base pairing between two DNA strands can take place at multiple points along the sequence. This may lead to the formation of “loop out” structures during DNA replication or DNA repair synthesis. This may lead to repeated copying of the repeated sequence, expanding the number of repeats. Additional mechanisms involving hybrid RNA:DNA intermediates have been proposed. Prime editing may be used to reduce or eliminate these triplet expansion regions by deletion one or more or the offending repeat codon triplets. In an embodiment of this use, FIG. 23, provides a schematic of a PEgRNA design for contracting or reducing trinucleotide repeat sequences with prime editing.

[1098] Prime editing may be implemented to contract triplet expansion regions by nicking a region upstream of the triplet repeat region with the prime editor comprising a PEgRNA appropriated targeted to the cut site. The prime editor then synthesizes a new DNA strand (ssDNA flap) based on the PEgRNA as a template (i.e., the edit template thereof) that codes for a healthy number of triplet repeats (which depends on the particular gene and disease). The newly synthesized ssDNA strand comprising the healthy triplet repeat sequence also is synthesized to include a short stretch of homology (i.e., the homology arm) that matches the sequence adjacent to the other end of the repeat (bold strand). Invasion of the newly synthesized strand, and subsequent replacement of the endogenous DNA with the newly synthesized ssDNA flap, leads to a contracted repeat allele.

[1099] Depending on the particular trinucleotide expansion disorder, the defect-inducing triplet expansions may occur in “trinucleotide repeat expansion proteins.” Trinucleotide repeat expansion proteins are a diverse set of proteins associated with susceptibility for developing a trinucleotide repeat expansion disorder, the presence of a trinucleotide repeat expansion disorder, the severity of a trinucleotide repeat expansion disorder or any combination thereof. Trinucleotide repeat expansion disorders are divided into two categories determined by the type of repeat. The most common repeat is the triplet CAG, which, when present in the coding region of a gene, codes for the amino acid glutamine (Q). Therefore, these disorders are referred to as the polyglutamine (polyQ) disorders and comprise the following diseases: Huntington Disease (HD); Spinobulbar Muscular Atrophy (SBMA); Spinocerebellar Ataxias (SCA types 1, 2, 3, 6, 7, and 17); and Dentatorubro-Pallidoluysian Atrophy (DRPLA). The remaining trinucleotide repeat expansion disorders either do not involve the CAG triplet or the CAG triplet is not in the coding region of the gene and are, therefore, referred to as the non-polyglutamine disorders. The non-polyglutamine disorders comprise Fragile X Syndrome (FRAXA); Fragile XE Mental Retardation (FRAXE); Friedreich Ataxia (FRDA); Myotonic Dystrophy (DM); and Spinocerebellar Ataxias (SCA types 8, and 12).

[1100] The proteins associated with trinucleotide repeat expansion disorders can be selected based on an experimental association of the protein associated with a trinucleotide repeat expansion disorder to a trinucleotide repeat expansion disorder. For example, the production rate or circulating concentration of a protein associated with a trinucleotide repeat expansion disorder may be elevated or depressed in a population having a trinucleotide repeat expansion disorder relative to a population lacking the trinucleotide repeat expansion disorder. Differences in protein levels may be assessed using proteomic techniques including but not limited to Western blot, immunohistochemical staining, enzyme linked immunosorbent assay (ELISA), and mass spectrometry. Alternatively, the proteins associated with trinucleotide repeat expansion disorders may be identified by obtaining gene expression profiles of the genes encoding the proteins using genomic techniques including but not limited to DNA microarray analysis, serial analysis of gene expression (SAGE), and quantitative real-time polymerase chain reaction (Q-PCR).

[1101] Non-limiting examples of proteins associated with trinucleotide repeat expansion disorders which can be corrected by prime editing include AR (androgen receptor), FMR1 (fragile X mental retardation 1), HTT (huntingtin), DMPK (dystrophia myotonica-protein kinase), FXN (frataxin), ATXN2 (ataxin 2), ATN1 (atrophin 1), FEN1 (flap structure-specific endonuclease 1), TNRC6A (trinucleotide repeat containing 6A), PABPN1 (poly(A) binding protein, nuclear 1), JPH3 (junctophilin 3), MED15 (mediator complex subunit 15), ATXN1 (ataxin 1), ATXN3 (ataxin 3), TBP (TATA box binding protein), CACNA1A (calcium channel, voltage-dependent, P/Q type, alpha 1A subunit), ATXN8OS (ATXN8 opposite strand (non-protein coding)), PPP2R2B (protein phosphatase 2, regulatory subunit B, beta), ATXN7 (ataxin 7), TNRC6B (trinucleotide repeat containing 6B), TNRC6C (trinucleotide repeat containing 6C), CELF3 (CUGBP, Elav-like family member 3), MAB21L1 (mab-21-like 1 (C. elegans)), MSH2 (mutS homolog 2, colon cancer, nonpolyposis type 1 (E. coli)), TMEM185A (transmembrane protein 185A), SIX5 (SIX homeobox 5), CNPY3 (canopy 3 homolog (zebrafish)), FRAXE (fragile site, folic acid type, rare, fra(X)(q28) E), GNB2 (guanine nucleotide binding protein (G protein), beta polypeptide 2), RPL14 (ribosomal protein L14), ATXN8 (ataxin 8), INSR (insulin receptor), TTR (transthyretin), EP400 (E1A binding protein p400), GIGYF2 (GRB10 interacting GYF protein 2), OGG1 (8-oxoguanine DNA glycosylase), STC1 (stanniocalcin 1), CNDP1 (carnosine dipeptidase 1 (metallopeptidase M20 family)), C10orf2 (chromosome 10 open reading frame 2), MAML3 mastermind-like 3 (Drosophila), DKC1 (dyskeratosis congenita 1, dyskerin), PAXIP1 (PAX interacting (with transcription-activation domain) protein 1), CASK (calcium/calmodulin-dependent serine protein kinase (MAGUK family)), MAPT (microtubule-associated protein tau), SP1 (Sp1 transcription factor), POLG (polymerase (DNA directed), gamma), AFF2 (AF4/FMR2 family, member 2), THBS1 (thrombospondin 1), TP53 (tumor protein p53), ESR1 (estrogen receptor 1), CGGBP1 (CGG triplet repeat binding protein 1), ABT1 (activator of basal transcription 1), KLK3 (kallikrein-related peptidase 3), PRNP (prion protein), JUN (jun oncogene), KCNN3 (potassium intermediate/small conductance calcium-activated channel, subfamily N, member 3), BAX (BCL2-associated X protein), FRAXA (fragile site, folic acid type, rare, fra(X)(q27.3) A (macroorchidism, mental retardation)), KBTBD10 (kelch repeat and BTB (POZ) domain containing 10), MBNL1 (muscleblind-like (Drosophila)), RAD51 (RAD51 homolog (RecA homolog, E. coli) (S. cerevisiae)), NCOA3 (nuclear receptor coactivator 3), ERDA1 (expanded repeat domain, CAG/CTG 1), TSC1 (tuberous sclerosis 1), COMP (cartilage oligomeric matrix protein), GCLC (glutamate-cysteine ligase, catalytic subunit), RRAD (Ras-related associated with diabetes), MSH3 (mutS homolog 3 aa(E. coli)), DRD2 aaaa(dopamine receptor D2), CD44 (CD44 molecule (Indian blood group)), CTCF (CCCTC-binding factor (zinc finger protein)), CCND1 (cyclin D1), CLSPN (claspin homolog (Xenopus laevis)), MEF2A (myocyte enhancer factor 2A), PTPRU (protein tyrosine phosphatase, receptor type, U), GAPDH (glyceraldehyde-3-phosphate dehydrogenase), TRIM22 (tripartite motif-containing 22), WT1 (Wilms tumor 1), AHR (aryl hydrocarbon receptor), GPX1 (glutathione peroxidase 1), TPMT (thiopurine S-methyltransferase), NDP (Norrie disease (pseudoglioma)), ARX (aristaless related homeobox), MUS81 (MUS81 endonuclease homolog (S. cerevisiae)), TYR (tyrosinase (oculocutaneous albinism IA)), EGR1 (early growth response 1), UNG (uracil-DNA glycosylase), NUMBL (numb homolog (Drosophila)-like), FABP2 (fatty acid binding protein 2, intestinal), EN2 (engrailed homeobox 2), CRYGC (crystallin, gamma C), SRP14 (signal recognition particle 14 kDa (homologous Alu RNA binding protein)), CRYGB (crystallin, gamma B), PDCD1 (programmed cell death 1), HOXA1 (homeobox A1), ATXN2L (ataxin 2-like), PMS2 (PMS2 postmeiotic segregation increased 2 (S. cerevisiae)), GLA (galactosidase, alpha), CBL (Cas-Br-M (murine) ecotropic retroviral transforming sequence), FTH1 (ferritin, heavy polypeptide 1), IL12RB2 (interleukin 12 receptor, beta 2), OTX2 (orthodenticle homeobox 2), HOXA5 (homeobox A5), POLG2 (polymerase (DNA directed), gamma 2, accessory subunit), DLX2 (distal-less homeobox 2), SIRPA (signal-regulatory protein alpha), OTX1 (orthodenticle homeobox 1), AHRR (aryl-hydrocarbon receptor repressor), MANF (mesencephalic astrocyte-derived neurotrophic factor), TMEM158 (transmembrane protein 158 (gene/pseudogene)), and ENSG00000078687.

[1102] In a particular aspect, the instant disclosure provides TPRT-based methods for the treatment of a subject diagnosed with an expansion repeat disorder (also known as a repeat expansion disorder or a trinucleotide repeat disorder). Expansion repeat disorders occur when microsatellite repeats expand beyond a threshold length. Currently, at least 30 genetic diseases are believed to be caused by repeat expansions. Scientific understanding of this diverse group of disorders came to lights in the early 1990's with the discovery that trinucleotide repeats underlie several major inherited conditions, including Fragile X, Spinal and Bulbar Muscular Atrophy, Myotonic Dystrophy, and Huntington's disease (Nelson et al, “The unstable repeats—three evolving faces of neurological disease,” Neuron, Mar. 6, 2013, Vol. 77; 825-843, which is incorporated herein by reference), as well as Haw River Syndrome, Jacobsen Syndrome, Dentatorubral-pallidoluysian atrophy (DRPLA), Machado-Joseph disease, Synpolydactyly (SPD II), Hand-foot genital syndrome (HFGS), Cleidocranial dysplasia (CCD), Holoprosencephaly disorder (HPE), Congenital central hypventilation syndrome (CCHS), ARX-nonsyndromic X-linked mental retardation (XLMR), and Oculopharyngeal muscular dystrophy (OPMD) (see. Microsatellite repeat instability was found to be a hallmark of these conditions, as was anticipation—the phenomenon in which repeat expansion can occur with each successive generation, which leads to a more severe phenotype and earlier age of onset in the offspring. Repeat expansions are believed to cause diseases via several different mechanisms. Namely, expansions may interfere with cellular functioning at the level of the gene, the mRNA transcript, and/or the encoded protein. In some conditions, mutations act via a loss-of-function mechanism by silencing repeat-containing genes. In others, disease results from gain-of-function mechanisms, whereby either the mRNA transcript or protein takes on new, aberrant functions.

[1103] In one embodiment, a method of treating a trinucleotide repeat disorder is depicted in FIG. 23. In general, the approach involves using TPRT genome editing (i.e., prime editing) in combination with an extended gRNA that comprises a region that encodes a desired and healthy replacement trinucleotide repeat sequence that is intended to replace the endogenous diseased trinucleotide repeat sequence through the mechanism of the prime editing process. A schematic of an exemplary gRNA design for contracting trinucleotide repeat sequences and trinucleotide repeat contraction with TPRT genome editing (i.e., prime editing) is shown in FIG. 23.

### Prion Disease

[1104] Prime editing can also be used to prevent or halt the progression of prion disease through the installation of one or more protective mutations into prion proteins (PRNP) which become misfolded during the course of disease. Prion diseases or transmissible spongiform encephalopathies (TSEs) are a family of rare progressive neurodegenerative disorders that affect both humans and animals. They are distinguished by long incubation periods, characteristic spongiform changes associated with neuronal loss, and a failure to induce inflammatory response.

[1105] In humans, prion disease includes Creutzfeldt-Jakob Disease (CJD), Variant Creutzfeldt-Jakob Disease (vCJD), Gerstmann-Straussler-Scheinker Syndrome, Fatal Familial Insomnia, and Kuru. In animals, prion disease includes Bovine Spongiform Encephalopathy (BSE or “mad cow disease”), Chronic Wasting Disease (CWD), Scrapie, Transmissible Mink Encephalopathy, Feline Spongiform Encephalopathy, and Ungulate Spongiform Encephalopathy. Prime editing may be used to install protective point mutations into a prion protein in order to prevent or halt the progression of any one of these prion diseases.

[1106] Classic CJD is a human prion disease. It is a neurodegenerative disorder with characteristic clinical and diagnostic features. This disease is rapidly progressive and always fatal. Infection with this disease leads to death usually within 1 year of onset of illness. CJD is a rapidly progressive, invariably fatal neurodegenerative disorder believed to be caused by an abnormal isoform of a cellular glycoprotein known as the prion protein. CJD occurs worldwide and the estimated annual incidence in many countries, including the United States, has been reported to be about one case per million population. The vast majority of CJD patients usually die within 1 year of illness onset. CJD is classified as a transmissible spongiform encephalopathy (TSE) along with other prion diseases that occur in humans and animals. In about 85% of patients, CJD occurs as a sporadic disease with no recognizable pattern of transmission. A smaller proportion of patients (5 to 15%) develop CJD because of inherited mutations of the prion protein gene. These inherited forms include Gerstmann-Straussler-Scheinker syndrome and fatal familial insomnia. No treatment is currently known for CJD.

[1107] Variant Creutzfeldt-Jakob disease (νCJD) is a prion disease that was first described in 1996 in the United Kingdom. There is now strong scientific evidence that the agent responsible for the outbreak of prion disease in cows, bovine spongiform encephalopathy (BSE or ‘mad cow’ disease), is the same agent responsible for the outbreak of νCJD in humans. Variant CJD (νCJD) is not the same disease as classic CJD (often simply called CJD). It has different clinical and pathologic characteristics from classic CJD. Each disease also has a particular genetic profile of the prion protein gene. Both disorders are invariably fatal brain diseases with unusually long incubation periods measured in years and are caused by an unconventional transmissible agent called a prion. No treatment is currently known for νCJD.

[1108] BSE (bovine spongiform encephalopathy or “mad cow disease”) is a progressive neurological disorder of cattle that results from infection by an unusual transmissible agent called a prion. The nature of the transmissible agent is not well understood. Currently, the most accepted theory is that the agent is a modified form of a normal protein known as prion protein. For reasons that are not yet understood, the normal prion protein changes into a pathogenic (harmful) form that then damages the central nervous system of cattle. There is increasing evidence that there are different strains of BSE: the typical or classic BSE strain responsible for the outbreak in the United Kingdom and two atypical strains (H and L strains). No treatment is currently known for BSE.

[1109] Chronic wasting disease (CWD) is a prion disease that affects deer, elk, reindeer, sika deer and moose. It has been found in some areas of North America, including Canada and the United States, Norway and South Korea. It may take over a year before an infected animal develops symptoms, which can include drastic weight loss (wasting), stumbling, listlessness and other neurologic symptoms. CWD can affect animals of all ages and some infected animals may die without ever developing the disease. CWD is fatal to animals and there are no treatments or vaccines.

[1110] The causative agents of TSEs are believed to be prions. The term “prions” refers to abnormal, pathogenic agents that are transmissible and are able to induce abnormal folding of specific normal cellular proteins called prion proteins that are found most abundantly in the brain. The functions of these normal prion proteins are still not completely understood. The abnormal folding of the prion proteins leads to brain damage and the characteristic signs and symptoms of the disease. Prion diseases are usually rapidly progressive and always fatal.

[1111] As used herein, the term “prion” shall mean an infectious particle known to cause diseases (spongiform encephalopathies) in humans and animals. The term “prion” is a contraction of the words “protein” and “infection” and the particles are comprised largely if not exclusively of PRNP^{Sc} molecules encoded by a PRNP gene which expresses PRNP^{C} which changes conformation to become PRNP^{Sc}. Prions are distinct from bacteria, viruses and viroids. Known prions include those which infect animals to cause scrapie, a transmissible, degenerative disease of the nervous system of sheep and goats as well as bovine spongiform encephalopathies (BSE) or mad cow disease and feline spongiform encephalopathies of cats. Four prion diseases, as discussed above, known to affect humans are (1) kuru, (2) Creutzfeldt-Jakob Disease (CJD), (3) Gerstmann-Strassler-Scheinker Disease (GSS), and (4) fatal familial insomnia (FFI). As used herein prion includes all forms of prions causing all or any of these diseases or others in any animals used—and in particular in humans and in domesticated farm animals.

[1112] In general, and without wishing to be bound by theory, prior diseases are caused by misfolding of prion proteins. Such diseases—often called deposition diseases—the misfolding of the prion proteins can be accounted for as follows. If A is the normally synthesized gene product that carries out an intended physiologic role in a monomeric or oligomeric state, A* is a conformationally activated form of A that is competent to undergo a dramatic conformational change, B is the conformationally altered state that prefers multimeric assemblies (i.e., the misfolded form which forms depositions) and Bₙ is the multimeric material that is pathogenic and relatively difficult to recycle. For the prion diseases, PRNP^{C} and PRNP^{Sc} correspond to states A and Bₙ where A is largely helical and monomeric and Bₙ is β-rich and multimeric.

[1113] It is known that certain mutations in prion proteins can be associated with increased risk of prior disease. Conversely, certain mutations in prion proteins can be protective in nature. See Bagynszky et al., “Characterization of mutations in PRNP (prion) gene and their possible roles in neurodegenerative diseases,” Neuropsychiatr Dis Treat., 2018; 14: 2067-2085, the contents of which are incorporated herein by reference.

[1114] PRNP (NCBI RefSeq No. NP_000302.1 (SEQ ID NO: 291))—the human prion protein—is encoded by a 16 kb long gene, located on chromosome 20 (4686151-4701588). It contains two exons, and the exon 2 carries the open reading frame which encodes the 253 amino acid (AA) long PrP protein. Exon 1 is a noncoding exon, which may serve as transcriptional initiation site. The post-translational modifications result in the removal of the first 22 AA N-terminal fragment (NTF) and the last 23 AA C-terminal fragment (CTF). The NTF is cleaved after PrP transport to the endoplasmic reticulum (ER), while the CTF (glycosylphosphatidylinositol [GPI] signal peptide [GPI-SP]) is cleaved by the GPI anchor. GPI anchor could be involved in PrP protein transport. It may also play a role of attachment of prion protein into the outer surface of cell membrane. Normal PrP is composed of a long N-terminal loop (which contains the octapeptide repeat region), two short β sheets, three a helices, and a C-terminal region (which contains the GPI anchor). Cleavage of PrP results in a 208 AA long glyocoprotein, anchored in the cell membrane.

[1115] The 253 amino acid sequence of PRNP (NP_000302.1) is as follows:

(SEQ ID NO: 291)
MANLGCWMLVLFVATWSDLGLCKKRPKPGGWNTGGSRYPGQGSPGGNRYP
PQGGGGWGQPHGGGWGQPHGGGWGQPHGGGWGQPHGGGWGQGGGTHSQWN
KPSKPKTNMKHMAGAAAAGAVVGGLGGYMLGSAMSRPIIHFGSDYEDRYY
RENMHRYPNQVYYRPMDEYSNQNNFVHDCVNITIKQHTVTTTTKGENFTE
TDVKMMERVVEQMCITQYERESQAYYQRGSSMVLFSSPPVILLISFLIFL
IVG.

[1116] The 253 amino acid sequence of PRNP (NP_000302.1) is encoded by the following nucleotide sequence (NCBI Ref. Seq No. NM_000311.5, “Homo sapiens prion protein (PRNP), transcript variant 1, mRNA), is as follows:

(SEQ ID NO: 292)
GCGAACCTTGGCTGCTGGATGCTGGTTCTCTTTGTGGCCACATGGAG
TGACCTGGGCCTCTGCAAGAAGCGCCCGAAGCCTGGAGGATGGAACA
CTGGGGGCAGCCGATACCCGGGGCAGGGCAGCCCTGGAGGCAACCGC
TACCCACCTCAGGGCGGTGGTGGCTGGGGGCAGCCTCATGGTGGTGG
CTGGGGGCAGCCTCATGGTGGTGGCTGGGGGCAGCCCCATGGTGGTG
GCTGGGGACAGCCTCATGGTGGTGGCTGGGGTCAAGGAGGTGGCACC
CACAGTCAGTGGAACAAGCCGAGTAAGCCAAAAACCAACATGAAGCA
CATGGCTGGTGCTGCAGCAGCTGGGGCAGTGGTGGGGGGCCTTGGCG
GCTACATGCTGGGAAGTGCCATGAGCAGGCCCATCATACATTTCGGC
AGTGACTATGAGGACCGTTACTATCGTGAAAACATGCACCGTTACCC
CAACCAAGTGTACTACAGGCCCATGGATGAGTACAGCAACCAGAACA
ACTTTGTGCACGACTGCGTCAATATCACAATCAAGCAGCACACGGTC
ACCACAACCACCAAGGGGGAGAACTTCACCGAGACCGACGTTAAGAT
GATGGAGCGCGTGGTTGAGCAGATGTGTATCACCCAGTACGAGAGGG
AATCTCAGGCCTATTACCAGAGAGGATCGAGCATGGTCCTCTTCTCC
TCTCCACCTGTGATCCTCCTGATCTCTTTCCTCATCTTCCTGATAGT
GGGATGAGGAAGGTCTTCCTGTTTTCACCATCTTTCTAATCTTTTTC
CAGCTTGAGGGAGGCGGTATCCACCTGCAGCCCTTTTAGTGGTGGTG
TCTCACTCTTTCTTCTCTCTTTGTCCCGGATAGGCTAATCAATACCC
TTGGCACTGATGGGCACTGGAAAACATAGAGTAGACCTGAGATGCTG
GTCAAGCCCCCTTTGATTGAGTTCATCATGAGCCGTTGCTAATGCCA
GGCCAGTAAAAGTATAACAGCAAATAACCATTGGTTAATCTGGACTT
ATTTTTGGACTTAGTGCAACAGGTTGAGGCTAAAACAAATCTCAGAA
CAGTCTGAAATACCTTTGCCTGGATACCTCTGGCTCCTTCAGCAGCT
AGAGCTCAGTATACTAATGCCCTATCTTAGTAGAGATTTCATAGCTA
TTTAGAGATATTTTCCATTTTAAGAAAACCCGACAACATTTCTGCCA
GGTTTGTTAGGAGGCCACATGATACTTATTCAAAAAAATCCTAGAGA
TTCTTAGCTCTTGGGATGCAGGCTCAGCCCGCTGGAGCATGAGCTCT
GTGTGTACCGAGAACTGGGGTGATGTTTTACTTTTCACAGTATGGGC
TACACAGCAGCTGTTCAACAAGAGTAAATATTGTCACAACACTGAAC
CTCTGGCTAGAGGACATATTCACAGTGAACATAACTGTAACATATAT
GAAAGGCTTCTGGGACTTGAAATCAAATGTTTGGGAATGGTGCCCTT
GGAGGCAACCTCCCATTTTAGATGTTTAAAGGACCCTATATGTGGCA
TTCCTTTCTTTAAACTATAGGTAATTAAGGCAGCTGAAAAGTAAATT
GCCTTCTAGACACTGAAGGCAAATCTCCTTTGTCCATTTACCTGGAA
ACCAGAATGATTTTGACATACAGGAGAGCTGCAGTTGTGAAAGCACC
ATCATCATAGAGGATGATGTAATTAAAAAATGGTCAGTGTGCAAAGA
AAAGAACTGCTTGCATTTCTTTATTTCTGTCTCATAATTGTCAAAAA
CCAGAATTAGGTCAAGTTCATAGTTTCTGTAATTGGCTTTTGAATCA
AAGAATAGGGAGACAATCTAAAAAATATCTTAGGTTGGAGATGACAG
AAATATGATTGATTTGAAGTGGAAAAAGAAATTCTGTTAATGTTAAT
TAAAGTAAAATTATTCCCTGAATTGTTTGATATTGTCACCTAGCAGA
TATGTATTACTTTTCTGCAATGTTATTATTGGCTTGCACTTTGTGAG
TATTCTATGTAAAAATATATATGTATATAAAATATATATTGCATAGG
ACAGACTTAGGAGTTTTGTTTAGAGCAGTTAACATCTGAAGTGTCTA
ATGCATTAACTTTTGTAAGGTACTGAATACTTAATATGTGGGAAACC
CTTTTGCGTGGTCCTTAGGCTTACAATGTGCACTGAATCGTTTCATG
TAAGAATCCAAAGTGGACACCATTAACAGGTCTTTGAAATATGCATG
TACTTTATATTTTCTATATTTGTAACTTTGCATGTTCTTGTTTTGTT
ATATAAAAAAATTGTAAATGTTTAATATCTGACTGAAATTAAACGAG
CGAAGATGAGCACCA

[1117] Mutation sites relative to PRNP (NP_000302.1) which are linked to CJD and FFI are reported are as follows. These mutations can be removed or installed using the prime editors disclosed herein.

| | AMINO ACID SEQUENCE OF MUTANT PRNP LINKED TO CJD PRION |
|---|---|
| | DISEASE (SEE TABLE 1 OF BAGYNSZKY ET AL., 2018) |
| MUTATION | (RELATIVE TO SEQ ID NO: 291 OF PRNP NP_000302.1) |
| D178N | MANLGCWMLVLFVATWSDLGLCKKRPKPGGWNTGGSRYPGQGSPGGNR |
| | YPPQGGGGWGQPHGGGWGQPHGGGWGQPHGGGWGQPHGGGWGQGG |
| | GTHSQWNKPSKPKTNMKHMAGAAAAGAVVGGLGGYMLGSAMSRPIIHF |
| | GSDYEDRYYRENMHRYPNQVYYRPMDEYSNQNNFVHNCVNITIKQHTVT |
| | TTTKGENFTETDVKMMERVVEQMCITQYERESQAYYQRGSSMVLFSSPPV |
| | (SEQ ID NO: 3940) |
| T188K | MANLGCWMLVLFVATWSDLGLCKKRPKPGGWNTGGSRYPGQGSPGGNR |
| | YPPQGGGGWGQPHGGGWGQPHGGGWGQPHGGGWGQPHGGGWGQGG |
| | GTHSQWNKPSKPKTNMKHMAGAAAAGAVVGGLGGYMLGSAMSRPIIHF |
| | GSDYEDRYYRENMHRYPNQVYYRPMDEYSNQNNFVHDCVNITIKQHKVT |
| | TTTKGENFTETDVKMMERVVEQMCITQYERESQAYYQRGSSMVLFSSPPV |
| | (SEQ ID NO: 3941) |
| E196K | MANLGCWMLVLFVATWSDLGLCKKRPKPGGWNTGGSRYPGQGSPGGNR |
| | YPPQGGGGWGQPHGGGWGQPHGGGWGQPHGGGWGQPHGGGWGQGG |
| | GTHSQWNKPSKPKTNMKHMAGAAAAGAVVGGLGGYMLGSAMSRPIIHF |
| | GSDYEDRYYRENMHRYPNQVYYRPMDEYSNQNNFVHDCVNITIKQHTVT |
| | TTTKGKNFTETDVKMMERVVEQMCITQYERESQAYYQRGSSMVLFSSPPV |
| | (SEQ ID NO: 3942) |
| E196A | MANLGCWMLVLFVATWSDLGLCKKRPKPGGWNTGGSRYPGQGSPGGNR |
| | YPPQGGGGWGQPHGGGWGQPHGGGWGQPHGGGWGQPHGGGWGQGG |
| | GTHSQWNKPSKPKTNMKHMAGAAAAGAVVGGLGGYMLGSAMSRPIIHF |
| | GSDYEDRYYRENMHRYPNQVYYRPMDEYSNQNNFVHDCVNITIKQHTVT |
| | TTTKGANFTETDVKMMERVVEQMCITQYERESQAYYQRGSSMVLFSSPPV |
| | (SEQ ID NO: 296) |
| E200K | MANLGCWMLVLFVATWSDLGLCKKRPKPGGWNTGGSRYPGQGSPGGNR |
| | YPPQGGGGWGQPHGGGWGQPHGGGWGQPHGGGWGQPHGGGWGQGG |
| | GTHS QWNKPS KPKTNMKHMAGAAAAGAVVGGLGGYMLGSAMSRPIIHF |
| | GSDYEDRYYRENMHRYPNQVYYRPMDEYSNQNNFVHDCVNITIKQHTVT |
| | TTTKGENFTKTDVKMMERVVEQMCITQYERESQAYYQRGSSMVLFSSPPV |
| | (SEQ ID NO: 3943) |
| E200G | MANLGCWMLVLFVATWSDLGLCKKRPKPGGWNTGGSRYPGQGSPGGNR |
| | YPPQGGGGWGQPHGGGWGQPHGGGWGQPHGGGWGQPHGGGWGQGG |
| | GTHSQWNKPSKPKTNMKHMAGAAAAGAVVGGLGGYMLGSAMSRPIIHF |
| | GSDYEDRYYRENMHRYPNQVYYRPMDEYSNQNNFVHDCVNITIKQHTVT |
| | TTTKGENFTGTDVKMMERVVEQMCITQYERESQAYYQRGSSMVLFSSPPV |
| | (SEQ ID NO: 298) |
| V203I | MANLGCWMLVLFVATWSDLGLCKKRPKPGGWNTGGSRYPGQGSPGGNR |
| | YPPQGGGGWGQPHGGGWGQPHGGGWGQPHGGGWGQPHGGGWGQGG |
| | GTHSQWNKPSKPKTNMKHMAGAAAAGAVVGGLGGYMLGSAMSRPIIHF |
| | GSDYEDRYYRENMHRYPNQVYYRPMDEYSNQNNFVHDCVNITIKQHTVT |
| | TTTKGENFTETDIKMMERVVEQMCITQYERESQAYYQRGSSMVLFSSPPV |
| | (SEQ ID NO: 3944) |
| R208H | MANLGCWMLVLFVATWSDLGLCKKRPKPGGWNTGGSRYPGQGSPGGNR |
| | YPPQGGGGWGQPHGGGWGQPHGGGWGQPHGGGWGQPHGGGWGQGG |
| | GTHSQWNKPSKPKTNMKHMAGAAAAGAVVGGLGGYMLGSAMSRPIIHF |
| | GSDYEDRYYRENMHRYPNQVYYRPMDEYSNQNNFVHDCVNITIKQHTVT |
| | TTTKGENFTETDVKMMEHVVEQMCITQYERESQAYYQRGSSMVLFSSPPV |
| | (SEQ ID NO: 3945) |
| V210I | MANLGCWMLVLFVATWSDLGLCKKRPKPGGWNTGGSRYPGQGSPGGNR |
| | YPPQGGGGWGQPHGGGWGQPHGGGWGQPHGGGWGQPHGGGWGQGG |
| | GTHSQWNKPSKPKTNMKHMAGAAAAGAVVGGLGGYMLGSAMSRPIIHF |
| | GSDYEDRYYRENMHRYPNQVYYRPMDEYSNQNNFVHDCVNITIKQHTVT |
| | TTTKGENFTETDVKMMERVIEQMCITQYERESQAYYQRGSSMVLFSSPPV |
| | (SEQ ID NO: 3946) |
| E211Q | MANLGCWMLVLFVATWSDLGLCKKRPKPGGWNTGGSRYPGQGSPGGNR |
| | YPPQGGGGWGQPHGGGWGQPHGGGWGQPHGGGWGQPHGGGWGQGG |
| | GTHSQWNKPSKPKTNMKHMAGAAAAGAVVGGLGGYMLGSAMSRPIIHF |
| | GSDYEDRYYRENMHRYPNQVYYRPMDEYSNQNNFVHDCVNITIKQHTVT |
| | TTTKGENFTETDVKMMERVVQQMCITQYERESQAYYQRGSSMVLFSSPPV |
| | (SEQ ID NO: 3947) |
| M232R | MANLGCWMLVLFVATWSDLGLCKKRPKPGGWNTGGSRYPGQGSPGGNR |
| | YPPQGGGGWGQPHGGGWGQPHGGGWGQPHGGGWGQPHGGGWGQGG |
| | GTHSQWNKPSKPKTNMKHMAGAAAAGAVVGGLGGYMLGSAMSRPIIHF |
| | GSDYEDRYYRENMHRYPNQVYYRPMDEYSNQNNFVHDCVNITIKQHTVT |
| | TTTKGENFTETDVKMMERVVEQMCITQYERESQAYYQRGSSRVLFSSPPV |
| | (SEQ ID NO: 3948) |

[1118] Mutation sites relative to PRNP (NP_000302.1) (SEQ ID NO: 291) which are linked to GSS are reported, as follows:

| | AMINO ACID SEQUENCE OF MUTANT PRNP LINKED TO GSS PRION |
|---|---|
| | DISEASE (SEE TABLE 2 OF BAGYNSZKY ET AL., 2018) |
| MUTATION | (RELATIVE TO SEQ ID NO: 291 OF PRNP NP_000302.1) |
| P102L | MANLGCWMLVLFVATWSDLGLCKKRPKPGGWNTGGSRYPGQGSPGGNR |
| | YPPQGGGGWGQPHGGGWGQPHGGGWGQPHGGGWGQPHGGGWGQGG |
| | GTHSQWNKLSKPKTNMKHMAGAAAAGAVVGGLGGYMLGSAMSRPIIHF |
| | GSDYEDRYYRENMHRYPNQVYYRPMDEYSNQNNFVHDCVNITIKQHTVT |
| | TTTKGENFTETDVKMMERVVEQMCITQYERESQAYYQRGSSMVLFSSPPV |
| | (SEQ ID NO: 3949) |
| P105L | MANLGCWMLVLFVATWSDLGLCKKRPKPGGWNTGGSRYPGQGSPGGNR |
| | YPPQGGGGWGQPHGGGWGQPHGGGWGQPHGGGWGQPHGGGWGQGG |
| | GTHSQWNKPSKLKTNMKHMAGAAAAGAVVGGLGGYMLGSAMSRPIIHF |
| | GSDYEDRYYRENMHRYPNQVYYRPMDEYSNQNNFVHDCVNITIKQHTVT |
| | TTTKGENFTETDVKMMERVVEQMCITQYERESQAYYQRGSSMVLFSSPPV |
| | (SEQ ID NO: 3950) |
| A117V | MANLGCWMLVLFVATWSDLGLCKKRPKPGGWNTGGSRYPGQGSPGGNR |
| | YPPQGGGGWGQPHGGGWGQPHGGGWGQPHGGGWGQPHGGGWGQGG |
| | GTHSQWNKPSKPKTNMKHMAGAAVAGAVVGGLGGYMLGSAMSRPIIHF |
| | GSDYEDRYYRENMHRYPNQVYYRPMDEYSNQNNFVHDCVNITIKQHTVT |
| | TTTKGENFTETDVKMMERVVEQMCITQYERESQAYYQRGSSMVLFSSPPV |
| | (SEQ ID NO: 3951) |
| G131V | MANLGCWMLVLFVATWSDLGLCKKRPKPGGWNTGGSRYPGQGSPGGNR |
| | YPPQGGGGWGQPHGGGWGQPHGGGWGQPHGGGWGQPHGGGWGQGG |
| | GTHSQWNKPSKPKTNMKHMAGAAAAGAVVGGLGGYMLVSAMSRPIIHF |
| | GSDYEDRYYRENMHRYPNQVYYRPMDEYSNQNNFVHDCVNITIKQHTVT |
| | TTTKGENFTETDVKMMERVVEQMCITQYERESQAYYQRGSSMVLFSSPPV |
| | (SEQ ID NO: 3952) |
| V176G | MANLGCWMLVLFVATWSDLGLCKKRPKPGGWNTGGSRYPGQGSPGGNR |
| | YPPQGGGGWGQPHGGGWGQPHGGGWGQPHGGGWGQPHGGGWGQGG |
| | GTHSQWNKPSKPKTNMKHMAGAAAAGAVVGGLGGYMLGSAMSRPIIHF |
| | GSDYEDRYYRENMHRYPNQVYYRPMDEYSNQNNFGHDCVNITIKQHTVT |
| | TTTKGENFTETDVKMMERVVEQMCITQYERESQAYYQRGSSMVLFSSPPV |
| | (SEQ ID NO: 3953) |
| H187R | MANLGCWMLVLFVATWSDLGLCKKRPKPGGWNTGGSRYPGQGSPGGNR |
| | YPPQGGGGWGQPHGGGWGQPHGGGWGQPHGGGWGQPHGGGWGQGG |
| | GTHSQWNKPSKPKTNMKHMAGAAAAGAVVGGLGGYMLGSAMSRPIIHF |
| | GSDYEDRYYRENMHRYPNQVYYRPMDEYSNQNNFVHDCVNITIKQRTVT |
| | TTTKGENFTETDVKMMERVVEQMCITQYERESQAYYQRGSSMVLFSSPPV |
| | (SEQ ID NO: 3954) |
| | MANLGCWMLVLFVATWSDLGLCKKRPKPGGWNTGGSRYPGQGSPGGNR |
| | YPPQGGGGWGQPHGGGWGQPHGGGWGQPHGGGWGQPHGGGWGQGG |
| | GTHSQWNKPSKPKTNMKHMAGAAAAGAVVGGLGGYMLGSAMSRPIIHF |
| | GSDYEDRYYRENMHRYPNQVYYRPMDEYSNQNNFVHDCVNITIKQHTVT |
| | TTTKGENFTETDVKMMERVVEQMCITQYERESQAYYQRGSSMVLFSSPPV |
| | (SEQ ID NO: 4084) |
| F198S | MANLGCWMLVLFVATWSDLGLCKKRPKPGGWNTGGSRYPGQGSPGGNR |
| | YPPQGGGGWGQPHGGGWGQPHGGGWGQPHGGGWGQPHGGGWGQGG |
| | GTHSQWNKPSKPKTNMKHMAGAAAAGAVVGGLGGYMLGSAMSRPIIHF |
| | GSDYEDRYYRENMHRYPNQVYYRPMDEYSNQNNFVHDCVNITIKQHTVT |
| | TTTKGENSTETDVKMMERVVEQMCITQYERESQAYYQRGSSMVLFSSPPV |
| | (SEQ ID NO: 3955) |
| D202N | MANLGCWMLVLFVATWSDLGLCKKRPKPGGWNTGGSRYPGQGSPGGNR |
| | YPPQGGGGWGQPHGGGWGQPHGGGWGQPHGGGWGQPHGGGWGQGG |
| | GTHSQWNKPSKPKTNMKHMAGAAAAGAVVGGLGGYMLGSAMSRPIIHF |
| | GSDYEDRYYRENMHRYPNQVYYRPMDEYSNQNNFVHDCVNITIKQHTVT |
| | TTTKGENFTETNVKMMERVVEQMCITQYERESQAYYQRGSSMVLFSSPPV |
| | (SEQ ID NO: 3956) |
| Q212P | MANLGCWMLVLFVATWSDLGLCKKRPKPGGWNTGGSRYPGQGSPGGNR |
| | YPPQGGGGWGQPHGGGWGQPHGGGWGQPHGGGWGQPHGGGWGQGG |
| | GTHSQWNKPSKPKTNMKHMAGAAAAGAVVGGLGGYMLGSAMSRPIIHF |
| | GSDYEDRYYRENMHRYPNQVYYRPMDEYSNQNNFVHDCVNITIKQHTVT |
| | TTTKGENFTETDVKMMERVVEPMCITQYERESQAYYQRGSSMVLFSSPPV |
| | (SEQ ID NO: 3957) |
| Q217R | MANLGCWMLVLFVATWSDLGLCKKRPKPGGWNTGGSRYPGQGSPGGNR |
| | YPPQGGGGWGQPHGGGWGQPHGGGWGQPHGGGWGQPHGGGWGQGG |
| | GTHSQWNKPSKPKTNMKHMAGAAAAGAVVGGLGGYMLGSAMSRPIIHF |
| | GSDYEDRYYRENMHRYPNQVYYRPMDEYSNQNNFVHDCVNITIKQHTVT |
| | TTTKGENFTETDVKMMERVVEQMCITRYERESQAYYQRGSSMVLFSSPPV |
| | (SEQ ID NO: 3958) |
| M232T | MANLGCWMLVLFVATWSDLGLCKKRPKPGGWNTGGSRYPGQGSPGGNR |
| | YPPQGGGGWGQPHGGGWGQPHGGGWGQPHGGGWGQPHGGGWGQGG |
| | GTHSQWNKPSKPKTNMKHMAGAAAAGAVVGGLGGYMLGSAMSRPIIHF |
| | GSDYEDRYYRENMHRYPNQVYYRPMDEYSNQNNFVHDCVNITIKQHTVT |
| | TTTKGENFTETDVKMMERVVEQMCITQYERESQAYYQRGSSTVLFSSPPV |
| | (SEQ ID NO: 3959) |

[1119] Mutation sites relative to PRNP (NP_000302.1) (SEQ ID NO: 291) which are linked to a possible protective nature against prion disease, as follows:

| | AMINO ACID SEQUENCE OF MUTANT PRNP LINKED |
|---|---|
| | TO A PROTECTIVE NATURE AGAINST PRION DISEASE |
| | (SEE TABLE 4 OF BAGYNSZKY ET AL., 2018) |
| MUTATION | (RELATIVE TO SEQ ID NO: 291 OF PRNP NP_000302.1) |
| G127S | MANLGCWMLVLFVATWSDLGLCKKRPKPGGWNTGGSRYPGQGSPGGNR |
| | YPPQGGGGWGQPHGGGWGQPHGGGWGQPHGGGWGQPHGGGWGQGG |
| | GTHSQWNKPSKPKTNMKHMAGAAAAGAVVGGLGSYMLGSAMSRPIIHF |
| | GSDYEDRYYRENMHRYPNQVYYRPMDEYSNQNNFVHDCVNITIKQHTVT |
| | TTTKGENFTETDVKMMERVVEQMCITQYERESQAYYQRGSSMVLFSSPPV |
| | (SEQ ID NO: 3960) |
| G127V | MANLGCWMLVLFVATWSDLGLCKKRPKPGGWNTGGSRYPGQGSPGGNR |
| | YPPQGGGGWGQPHGGGWGQPHGGGWGQPHGGGWGQPHGGGWGQGG |
| | GTHSQWNKPSKPKTNMKHMAGAAAAGAVVGGLGVYMLGSAMSRPIIHF |
| | GSDYEDRYYRENMHRYPNQVYYRPMDEYSNQNNFVHDCVNITIKQHTVT |
| | TTTKGENFTETDVKMMERVVEQMCITQYERESQAYYQRGSSMVLFSSPPV |
| | (SEQ ID NO: 3961) |
| M129V | MANLGCWMLVLFVATWSDLGLCKKRPKPGGWNTGGSRYPGQGSPGGNR |
| | YPPQGGGGWGQPHGGGWGQPHGGGWGQPHGGGWGQPHGGGWGQGG |
| | GTHSQWNKPSKPKTNMKHMAGAAAAGAVVGGLGGYVLGSAMSRPIIHF |
| | GSDYEDRYYRENMHRYPNQVYYRPMDEYSNQNNFVHDCVNITIKQHTVT |
| | TTTKGENFTETDVKMMERVVEQMCITQYERESQAYYQRGSSMVLFSSPPV |
| | (SEQ ID NO: 3962) |
| D167G | MANLGCWMLVLFVATWSDLGLCKKRPKPGGWNTGGSRYPGQGSPGGNR |
| | YPPQGGGGWGQPHGGGWGQPHGGGWGQPHGGGWGQPHGGGWGQGG |
| | GTHSQWNKPSKPKTNMKHMAGAAAAGAVVGGLGGYMLGSAMSRPIIHF |
| | GSDYEDRYYRENMHRYPNQVYYRPMGEYSNQNNFVHDCVNITIKQHTVT |
| | TTTKGENFTETDVKMMERVVEQMCITQYERESQAYYQRGSSMVLFSSPPV |
| | (SEQ ID NO: 3963) |
| D167N | MANLGCWMLVLFVATWSDLGLCKKRPKPGGWNTGGSRYPGQGSPGGNR |
| | YPPQGGGGWGQPHGGGWGQPHGGGWGQPHGGGWGQPHGGGWGQGG |
| | GTHSQWNKPSKPKTNMKHMAGAAAAGAVVGGLGGYMLGSAMSRPIIHF |
| | GSDYEDRYYRENMHRYPNQVYYRPMNEYSNQNNFVHDCVNITIKQHTVT |
| | TTTKGENFTETDVKMMERVVEQMCITQYERESQAYYQRGSSMVLFSSPPV |
| | (SEQ ID NO: 3964) |
| N171S | MANLGCWMLVLFVATWSDLGLCKKRPKPGGWNTGGSRYPGQGSPGGNR |
| | YPPQGGGGWGQPHGGGWGQPHGGGWGQPHGGGWGQPHGGGWGQGG |
| | GTHSQWNKPSKPKTNMKHMAGAAAAGAVVGGLGGYMLGSAMSRPIIHF |
| | GSDYEDRYYRENMHRYPNQVYYRPMDEYS SQNNFVHDCVNITIKQHTVT |
| | TTTKGENFTETDVKMMERVVEQMCITQYERESQAYYQRGSSMVLFSSPPV |
| | (SEQ ID NO: 3965) |
| E219K | MANLGCWMLVLFVATWSDLGLCKKRPKPGGWNTGGSRYPGQGSPGGNR |
| | YPPQGGGGWGQPHGGGWGQPHGGGWGQPHGGGWGQPHGGGWGQGG |
| | GTHSQWNKPSKPKTNMKHMAGAAAAGAVVGGLGGYMLGSAMSRPIIHF |
| | GSDYEDRYYRENMHRYPNQVYYRPMDEYSNQNNFVHDCVNITIKQHTVT |
| | TTTKGENFTETDVKMMERVVEQMCITQYKRESQAYYQRGSSMVLFSSPPV |
| | (SEQ ID NO: 3966) |
| P238S | MANLGCWMLVLFVATWSDLGLCKKRPKPGGWNTGGSRYPGQGSPGGNR |
| | YPPQGGGGWGQPHGGGWGQPHGGGWGQPHGGGWGQPHGGGWGQGG |
| | GTHSQWNKPSKPKTNMKHMAGAAAAGAVVGGLGGYMLGSAMSRPIIHF |
| | GSDYEDRYYRENMHRYPNQVYYRPMDEYSNQNNFVHDCVNITIKQHTVT |
| | TTTKGENFTETDVKMMERVVEQMCITQYERESQAYYQRGSSMVLFSSSPV |
| | (SEQ ID NO: 3967) |

[1120] Thus, in various embodiments, prime editing may be used to remove a mutation in PRNP that is linked to prion disease or install a mutation in PRNP that is considered to be protective against prion disease. For example, prime editing may be use to remove or restore a D178N, V1801, T188K, E196K, E196A, E200K, E200G, V2031, R208H, V2101, E211Q, I215V, or M232R mutation in the PRNP protein (relative to PRNP of NP_000302.1) (SEQ ID NO: 291). In other embodiments, prime editing may be use to remove or restore a P102L, P105L, A1 17V, G131V, V176G, H187R, F198S, D202N, Q212P, Q217R, or M232T mutation in the PRNP protein (relative to PRNP of NP_000302.1) (SEQ ID NO: 291). By removing or correcting for the presence of such mutations in PRNP using prime editing, the risk of prion disease may be reduced or eliminated.

[1121] In other embodiments, prime editing may be used to install a protective mutation in PRNP that is linked to a protective effect against one or more prion diseases. For example, prime editing may be used to install a G127S, G127V, M129V, D167G, D167N, N171S, E219K, or P238S protective mutation in PRNP (relative to PRNP of NP_000302.1) (SEQ ID NO: 291). In still other embodiments, the protective mutation may be any alternate amino acid installed at G127, G127, M129, D167, D167, N171, E219, or P238 in PRNP (relative to PRNP of NP_000302.1) (SEQ ID NO: 291).

[1122] In particular embodiments, prime editing may be used to install a G127V protective mutation in PRNP, as illustrated in FIG. 27 and discussed in Example 5.

[1123] In another embodiment, prime editing may be used to install an E219K protective mutation in PRNP.

[1124] The PRNP protein and the protective mutation site are conserved in mammals, so in addition to treating human disease it could also be used to generate cows and sheep that are immune to prion disease, or even help cure wild populations of animals that are suffering from prion disease. Prime editing has already been used to achieve ˜25% installation of a naturally occurring protective allele in human cells, and previous mouse experiments indicate that this level of installation is sufficient to cause immunity from most prion diseases. This method is the first and potentially only current way to install this allele with such high efficiency in most cell types. Another possible strategy for treatment is to use prime editing to reduce or eliminate the expression of PRNP by installing an early stop codon in the gene.

[1125] Using the principles described herein for PEgRNA design, appropriate PEgRNAs may be designed for installing desired protective mutations, or for removing prion disease-associated mutations from PRNP. For example, the below list of PEgRNAs can be used to install the G127V protective allele and the E219K protective allele in human PRNP, as well as the G127V protective allele in PRNP of various animals.

### [9] Pharmaceutical Compositions

[1126] Other aspects of the present disclosure relate to pharmaceutical compositions comprising any of the various components of the prime editing system described herein (e.g., including, but not limited to, the napDNAbps, reverse transcriptases, fusion proteins (e.g., comprising napDNAbps and reverse transcriptases), extended guide RNAs, and complexes comprising fusion proteins and extended guide RNAs, as well as accessory elements, such as second strand nicking components and 5′ endogenous DNA flap removal endonucleases for helping to drive the prime editing process towards the edited product formation).

[1127] The term “pharmaceutical composition”, as used herein, refers to a composition formulated for pharmaceutical use. In some embodiments, the pharmaceutical composition further comprises a pharmaceutically acceptable carrier. In some embodiments, the pharmaceutical composition comprises additional agents (e.g. for specific delivery, increasing half-life, or other therapeutic compounds).

[1128] As used here, the term “pharmaceutically-acceptable carrier” means a pharmaceutically-acceptable material, composition or vehicle, such as a liquid or solid filler, diluent, excipient, manufacturing aid (e.g., lubricant, talc magnesium, calcium or zinc stearate, or steric acid), or solvent encapsulating material, involved in carrying or transporting the compound from one site (e.g., the delivery site) of the body, to another site (e.g., organ, tissue or portion of the body). A pharmaceutically acceptable carrier is “acceptable” in the sense of being compatible with the other ingredients of the formulation and not injurious to the tissue of the subject (e.g., physiologically compatible, sterile, physiologic pH, etc.). Some examples of materials which can serve as pharmaceutically-acceptable carriers include: (1) sugars, such as lactose, glucose and sucrose; (2) starches, such as corn starch and potato starch; (3) cellulose, and its derivatives, such as sodium carboxymethyl cellulose, methylcellulose, ethyl cellulose, microcrystalline cellulose and cellulose acetate; (4) powdered tragacanth; (5) malt; (6) gelatin; (7) lubricating agents, such as magnesium stearate, sodium lauryl sulfate and talc; (8) excipients, such as cocoa butter and suppository waxes; (9) oils, such as peanut oil, cottonseed oil, safflower oil, sesame oil, olive oil, corn oil and soybean oil; (10) glycols, such as propylene glycol; (11) polyols, such as glycerin, sorbitol, mannitol and polyethylene glycol (PEG); (12) esters, such as ethyl oleate and ethyl laurate; (13) agar; (14) buffering agents, such as magnesium hydroxide and aluminum hydroxide; (15) alginic acid; (16) pyrogen-free water; (17) isotonic saline; (18) Ringer's solution; (19) ethyl alcohol; (20) pH buffered solutions; (21) polyesters, polycarbonates and/or polyanhydrides; (22) bulking agents, such as polypeptides and amino acids (23) serum component, such as serum albumin, HDL and LDL; (22) C2-C12 alcohols, such as ethanol; and (23) other non-toxic compatible substances employed in pharmaceutical formulations. Wetting agents, coloring agents, release agents, coating agents, sweetening agents, flavoring agents, perfuming agents, preservative and antioxidants can also be present in the formulation. The terms such as “excipient”, “carrier”, “pharmaceutically acceptable carrier” or the like are used interchangeably herein.

[1129] In some embodiments, the pharmaceutical composition is formulated for delivery to a subject, e.g., for gene editing. Suitable routes of administrating the pharmaceutical composition described herein include, without limitation: topical, subcutaneous, transdermal, intradermal, intralesional, intraarticular, intraperitoneal, intravesical, transmucosal, gingival, intradental, intracochlear, transtympanic, intraorgan, epidural, intrathecal, intramuscular, intravenous, intravascular, intraosseus, periocular, intratumoral, intracerebral, and intracerebroventricular administration.

[1130] In some embodiments, the pharmaceutical composition described herein is administered locally to a diseased site (e.g., tumor site). In some embodiments, the pharmaceutical composition described herein is administered to a subject by injection, by means of a catheter, by means of a suppository, or by means of an implant, the implant being of a porous, non-porous, or gelatinous material, including a membrane, such as a sialastic membrane, or a fiber.

[1131] In other embodiments, the pharmaceutical composition described herein is delivered in a controlled release system. In one embodiment, a pump may be used (see, e.g., Langer, 1990, Science 249:1527-1533; Sefton, 1989, CRC Crit. Ref. Biomed. Eng. 14:201; Buchwald et al., 1980, Surgery 88:507; Saudek et al., 1989, N. Engl. J. Med. 321:574). In another embodiment, polymeric materials can be used. (See, e.g., Medical Applications of Controlled Release (Langer and Wise eds., CRC Press, Boca Raton, Fla., 1974); Controlled Drug Bioavailability, Drug Product Design and Performance (Smolen and Ball eds., Wiley, New York, 1984); Ranger and Peppas, 1983, Macromol. Sci. Rev. Macromol. Chem. 23:61. See also Levy et al., 1985, Science 228:190; During et al., 1989, Ann. Neurol. 25:351; Howard et al., 1989, J. Neurosurg. 71:105). Other controlled release systems are discussed, for example, in Langer, supra.

[1132] In some embodiments, the pharmaceutical composition is formulated in accordance with routine procedures as a composition adapted for intravenous or subcutaneous administration to a subject, e.g., a human. In some embodiments, pharmaceutical composition for administration by injection are solutions in sterile isotonic aqueous buffer. Where necessary, the pharmaceutical can also include a solubilizing agent and a local anesthetic such as lignocaine to ease pain at the site of the injection. Generally, the ingredients are supplied either separately or mixed together in unit dosage form, for example, as a dry lyophilized powder or water free concentrate in a hermetically sealed container such as an ampoule or sachette indicating the quantity of active agent. Where the pharmaceutical is to be administered by infusion, it can be dispensed with an infusion bottle containing sterile pharmaceutical grade water or saline. Where the pharmaceutical composition is administered by injection, an ampoule of sterile water for injection or saline can be provided so that the ingredients can be mixed prior to administration.

[1133] A pharmaceutical composition for systemic administration may be a liquid, e.g., sterile saline, lactated Ringer's or Hank's solution. In addition, the pharmaceutical composition can be in solid forms and re-dissolved or suspended immediately prior to use. Lyophilized forms are also contemplated.

[1134] The pharmaceutical composition can be contained within a lipid particle or vesicle, such as a liposome or microcrystal, which is also suitable for parenteral administration. The particles can be of any suitable structure, such as unilamellar or plurilamellar, so long as compositions are contained therein. Compounds can be entrapped in “stabilized plasmid-lipid particles” (SPLP) containing the fusogenic lipid dioleoylphosphatidylethanolamine (DOPE), low levels (5-10 mol %) of cationic lipid, and stabilized by a polyethyleneglycol (PEG) coating (Zhang Y. P. et al., Gene Ther. 1999, 6:1438-47). Positively charged lipids such as N-[1-(2,3-dioleoyloxi)propyl]-N,N,N-trimethyl-amoniummethylsulfate, or “DOTAP,” are particularly preferred for such particles and vesicles. The preparation of such lipid particles is well known. See, e.g., U.S. Pat. Nos. 4,880,635; 4,906,477; 4,911,928; 4,917,951; 4,920,016; and 4,921,757; each of which is incorporated herein by reference.

[1135] The pharmaceutical composition described herein may be administered or packaged as a unit dose, for example. The term “unit dose” when used in reference to a pharmaceutical composition of the present disclosure refers to physically discrete units suitable as unitary dosage for the subject, each unit containing a predetermined quantity of active material calculated to produce the desired therapeutic effect in association with the required diluent; i.e., carrier, or vehicle.

[1136] Further, the pharmaceutical composition can be provided as a pharmaceutical kit comprising (a) a container containing a compound of the invention in lyophilized form and (b) a second container containing a pharmaceutically acceptable diluent (e.g., sterile water) for injection. The pharmaceutically acceptable diluent can be used for reconstitution or dilution of the lyophilized compound of the invention. Optionally associated with such container(s) can be a notice in the form prescribed by a governmental agency regulating the manufacture, use or sale of pharmaceuticals or biological products, which notice reflects approval by the agency of manufacture, use or sale for human administration.

[1137] In another aspect, an article of manufacture containing materials useful for the treatment of the diseases described above is included. In some embodiments, the article of manufacture comprises a container and a label. Suitable containers include, for example, bottles, vials, syringes, and test tubes. The containers may be formed from a variety of materials such as glass or plastic. In some embodiments, the container holds a composition that is effective for treating a disease described herein and may have a sterile access port. For example, the container may be an intravenous solution bag or a vial having a stopper pierce-able by a hypodermic injection needle. The active agent in the composition is a compound of the invention. In some embodiments, the label on or associated with the container indicates that the composition is used for treating the disease of choice. The article of manufacture may further comprise a second container comprising a pharmaceutically-acceptable buffer, such as phosphate-buffered saline, Ringer's solution, or dextrose solution. It may further include other materials desirable from a commercial and user standpoint, including other buffers, diluents, filters, needles, syringes, and package inserts with instructions for use.

[10] Kits, cells, vectors, and delivery

### Kits

[1138] The compositions of the present disclosure may be assembled into kits. In some embodiments, the kit comprises nucleic acid vectors for the expression of the prime editors described herein. In other embodiments, the kit further comprises appropriate guide nucleotide sequences (e.g., PEgRNAs and second-site gRNAs) or nucleic acid vectors for the expression of such guide nucleotide sequences, to target the Cas9 protein or prime editor to the desired target sequence.

[1139] The kit described herein may include one or more containers housing components for performing the methods described herein and optionally instructions for use. Any of the kit described herein may further comprise components needed for performing the assay methods. Each component of the kits, where applicable, may be provided in liquid form (e.g., in solution) or in solid form, (e.g., a dry powder). In certain cases, some of the components may be reconstitutable or otherwise processible (e.g., to an active form), for example, by the addition of a suitable solvent or other species (for example, water), which may or may not be provided with the kit.

[1140] In some embodiments, the kits may optionally include instructions and/or promotion for use of the components provided. As used herein, “instructions” can define a component of instruction and/or promotion, and typically involve written instructions on or associated with packaging of the disclosure. Instructions also can include any oral or electronic instructions provided in any manner such that a user will clearly recognize that the instructions are to be associated with the kit, for example, audiovisual (e.g., videotape, DVD, etc.), Internet, and/or web-based communications, etc. The written instructions may be in a form prescribed by a governmental agency regulating the manufacture, use, or sale of pharmaceuticals or biological products, which can also reflect approval by the agency of manufacture, use or sale for animal administration. As used herein, “promoted” includes all methods of doing business including methods of education, hospital and other clinical instruction, scientific inquiry, drug discovery or development, academic research, pharmaceutical industry activity including pharmaceutical sales, and any advertising or other promotional activity including written, oral and electronic communication of any form, associated with the disclosure. Additionally, the kits may include other components depending on the specific application, as described herein.

[1141] The kits may contain any one or more of the components described herein in one or more containers. The components may be prepared sterilely, packaged in a syringe and shipped refrigerated. Alternatively it may be housed in a vial or other container for storage. A second container may have other components prepared sterilely. Alternatively the kits may include the active agents premixed and shipped in a vial, tube, or other container.

[1142] The kits may have a variety of forms, such as a blister pouch, a shrink wrapped pouch, a vacuum sealable pouch, a sealable thermoformed tray, or a similar pouch or tray form, with the accessories loosely packed within the pouch, one or more tubes, containers, a box or a bag. The kits may be sterilized after the accessories are added, thereby allowing the individual accessories in the container to be otherwise unwrapped. The kits can be sterilized using any appropriate sterilization techniques, such as radiation sterilization, heat sterilization, or other sterilization methods known in the art. The kits may also include other components, depending on the specific application, for example, containers, cell media, salts, buffers, reagents, syringes, needles, a fabric, such as gauze, for applying or removing a disinfecting agent, disposable gloves, a support for the agents prior to administration, etc. Some aspects of this disclosure provide kits comprising a nucleic acid construct comprising a nucleotide sequence encoding the various components of the prime editing system described herein (e.g., including, but not limited to, the napDNAbps, reverse transcriptases, polymerases, fusion proteins (e.g., comprising napDNAbps and reverse transcriptases (or more broadly, polymerases), extended guide RNAs, and complexes comprising fusion proteins and extended guide RNAs, as well as accessory elements, such as second strand nicking components (e.g., second strand nicking gRNA) and 5′ endogenous DNA flap removal endonucleases for helping to drive the prime editing process towards the edited product formation). In some embodiments, the nucleotide sequence(s) comprises a heterologous promoter (or more than a single promoter) that drives expression of the prime editing system components.

[1143] Other aspects of this disclosure provide kits comprising one or more nucleic acid constructs encoding the various components of the prime editing system described herein, e.g., the comprising a nucleotide sequence encoding the components of the prime editing system capable of modifying a target DNA sequence. In some embodiments, the nucleotide sequence comprises a heterologous promoter that drives expression of the prime editing system components.

[1144] Some aspects of this disclosure provides kits comprising a nucleic acid construct, comprising (a) a nucleotide sequence encoding a napDNAbp (e.g., a Cas9 domain) fused to a reverse transcriptase and (b) a heterologous promoter that drives expression of the sequence of (a).

### Cells

[1145] Cells that may contain any of the compositions described herein include prokaryotic cells and eukaryotic cells. The methods described herein are used to deliver a Cas9 protein or a prime editor into a eukaryotic cell (e.g., a mammalian cell, such as a human cell). In some embodiments, the cell is in vitro (e.g., cultured cell. In some embodiments, the cell is in vivo (e.g., in a subject such as a human subject). In some embodiments, the cell is ex vivo (e.g., isolated from a subject and may be administered back to the same or a different subject).

[1146] Mammalian cells of the present disclosure include human cells, primate cells (e.g., vero cells), rat cells (e.g., GH3 cells, OC23 cells) or mouse cells (e.g., MC3T3 cells). There are a variety of human cell lines, including, without limitation, human embryonic kidney (HEK) cells, HeLa cells, cancer cells from the National Cancer Institute's 60 cancer cell lines (NCI60), DU145 (prostate cancer) cells, Lncap (prostate cancer) cells, MCF-7 (breast cancer) cells, MDA-MB-438 (breast cancer) cells, PC3 (prostate cancer) cells, T47D (breast cancer) cells, THP-1 (acute myeloid leukemia) cells, U87 (glioblastoma) cells, SHSY5Y human neuroblastoma cells (cloned from a myeloma) and Saos-2 (bone cancer) cells. In some embodiments, rAAV vectors are delivered into human embryonic kidney (HEK) cells (e.g., HEK 293 or HEK 293T cells). In some embodiments, rAAV vectors are delivered into stem cells (e.g., human stem cells) such as, for example, pluripotent stem cells (e.g., human pluripotent stem cells including human induced pluripotent stem cells (hiPSCs)). A stem cell refers to a cell with the ability to divide for indefinite periods in culture and to give rise to specialized cells. A pluripotent stem cell refers to a type of stem cell that is capable of differentiating into all tissues of an organism, but not alone capable of sustaining full organismal development. A human induced pluripotent stem cell refers to a somatic (e.g., mature or adult) cell that has been reprogrammed to an embryonic stem cell-like state by being forced to express genes and factors important for maintaining the defining properties of embryonic stem cells (see, e.g., Takahashi and Yamanaka, Cell 126 (4): 663-76, 2006, incorporated by reference herein). Human induced pluripotent stem cell cells express stem cell markers and are capable of generating cells characteristic of all three germ layers (ectoderm, endoderm, mesoderm).

[1147] Additional non-limiting examples of cell lines that may be used in accordance with the present disclosure include 293-T, 293-T, 3T3, 4T1, 721, 9L, A-549, A172, A20, A253, A2780, A2780ADR, A2780cis, A431, ALC, B16, B35, BCP-1, BEAS-2B, bEnd.3, BHK-21, BR 293, BxPC3, C2C12, C3H-10T1/2, C6, C6/36, Cal-27, CGR8, CHO, CML T1, CMT, COR-L23, COR-L23/5010, COR-L23/CPR, COR-L23/R23, COS-7, COV-434, CT26, D17, DH82, DU145, DuCaP, E14Tg2a, EL4, EM2, EM3, EMT6/AR1, EMT6/AR10.0, FM3, H1299, H69, HB54, HB55, HCA2, Hepalc1c7, High Five cells, HL-60, HMEC, HT-29, HUVEC, J558L cells, Jurkat, JY cells, K562 cells, KCL22, KG1, Ku812, KYO1, LNCap, Ma-Mel 1, 2, 3 . . . 48, MC-38, MCF-10A, MCF-7, MDA-MB-231, MDA-MB-435, MDA-MB-468, MDCK II, MG63, MONO-MAC 6, MOR/0.2R, MRCS, MTD-1A, MyEnd, NALM-1, NCI-H69/CPR, NCI-H69/LX10, NCI-H69/LX20, NCI-H69/LX4, NIH-3T3, NW-145, OPCN/OPCT Peer, PNT-1A/PNT 2, PTK2, Raji, RBL cells, RenCa, RIN-5F, RMA/RMAS, S2, Saos-2 cells, Sf21, Sf9, SiHa, SKBR3, SKOV-3, T-47D, T2, T84, THP1, U373, U87, U937, VCaP, WM39, WT-49, X63, YAC-1 and YAR cells.

[1148] Some aspects of this disclosure provide cells comprising any of the constructs disclosed herein. In some embodiments, a host cell is transiently or non-transiently transfected with one or more vectors described herein. In some embodiments, a cell is transfected as it naturally occurs in a subject. In some embodiments, a cell that is transfected is taken from a subject. In some embodiments, the cell is derived from cells taken from a subject, such as a cell line. A wide variety of cell lines for tissue culture are known in the art. Examples of cell lines include, but are not limited to, C8161, CCRF-CEM, MOLT, mIMCD-3, NHDF, HeLa-S3, Huhl, Huh4, Huh7, HUVEC, HASMC, HEKn, HEKa, MiaPaCell, Pancl, PC-3, TF1, CTLL-2, C1R, Rat6, CV1, RPTE, A10, T24, J82, A375, ARH-77, Calul, SW480, SW620, SKOV3, SK-UT, CaCo2, P388D1, SEM-K2, WEHI-231, HB56, TIB55, Jurkat, J45.01, LRMB, Bcl-1, BC-3, IC21, DLD2, Raw264.7, NRK, NRK-52E, MRCS, MEF, Hep G2, HeLa B, HeLa T4, COS, COS-1, COS-6, COS-M6A, BS-C-1 monkey kidney epithelial, BALB/3T3 mouse embryo fibroblast, 3T3 Swiss, 3T3-L1, 132-d5 human fetal fibroblasts; 10.1 mouse fibroblasts, 293-T, 3T3, 721, 9L, A2780, A2780ADR, A2780cis, A 172, A20, A253, A431, A-549, ALC, B16, B35, BCP-1 cells, BEAS-2B, bEnd.3, BHK-21, BR 293. BxPC3. C3H-10T1/2, C6/36, Cal-27, CHO, CHO-7, CHO—IR, CHO-K1, CHO-K2, CHO-T, CHO Dhfr -/-, COR-L23, COR-L23/CPR, COR-L23/5010, COR-L23/R23, COS-7, COV-434, CML T1, CMT, CT26, D17, DH82, DU145, DuCaP, EL4, EM2, EM3, EMT6/AR1, EMT6/AR10.0, FM3, H1299, H69, HB54, HB55, HCA2, HEK-293, HeLa, Hepalc1c7, HL-60, HMEC, HT-29, Jurkat, JY cells, K562 cells, Ku812, KCL22, KG1, KYO1, LNCap, Ma-Mel 1-48, MC-38, MCF-7, MCF-10A, MDA-MB-231, MDA-MB-468, MDA-MB-435, MDCK II, MDCK 11, MOR/0.2R, MONO-MAC 6, MTD-1A, MyEnd, NCI-H69/CPR, NCI-H69/LX10, NCI-H69/LX20, NCI-H69/LX4, NIH-3T3, NALM-1, NW-145, OPCN/OPCT cell lines, Peer, PNT-1A/PNT 2, RenCa, RIN-5F, RMA/RMAS, Saos-2 cells, Sf-9, SkBr3, T2, T-47D, T84, THP1 cell line, U373, U87, U937, VCaP, Vero cells, WM39, WT-49, X63, YAC-1, YAR, and transgenic varieties thereof.

[1149] Cell lines are available from a variety of sources known to those with skill in the art (see, e.g., the American Type Culture Collection (ATCC) (Manassas, Va.)). In some embodiments, a cell transfected with one or more vectors described herein is used to establish a new cell line comprising one or more vector-derived sequences. In some embodiments, a cell transiently transfected with the components of a CRISPR system as described herein (such as by transient transfection of one or more vectors, or transfection with RNA), and modified through the activity of a CRISPR complex, is used to establish a new cell line comprising cells containing the modification but lacking any other exogenous sequence. In some embodiments, cells transiently or non-transiently transfected with one or more vectors described herein, or cell lines derived from such cells are used in assessing one or more test compounds.

### Vectors

[1150] Some aspects of the present disclosure relate to using recombinant virus vectors (e.g., adeno-associated virus vectors, adenovirus vectors, or herpes simplex virus vectors) for the delivery of the prime editors or components thereof described herein, e.g., the split Cas9 protein or a split nucleobase prime editors, into a cell. In the case of a split-PE approach, the N-terminal portion of a PE fusion protein and the C-terminal portion of a PE fusion are delivered by separate recombinant virus vectors (e.g., adeno-associated virus vectors, adenovirus vectors, or herpes simplex virus vectors) into the same cell, since the full-length Cas9 protein or prime editors exceeds the packaging limit of various virus vectors, e.g., rAAV (˜4.9 kb).

[1151] Thus, in one embodiment, the disclosure contemplates vectors capable of delivering split prime editor fusion proteins, or split components thereof. In some embodiments, a composition for delivering the split Cas9 protein or split prime editor into a cell (e.g., a mammalian cell, a human cell) is provided. In some embodiments, the composition of the present disclosure comprises: (i) a first recombinant adeno-associated virus (rAAV) particle comprising a first nucleotide sequence encoding a N-terminal portion of a Cas9 protein or prime editor fused at its C-terminus to an intein-N; and (ii) a second recombinant adeno-associated virus (rAAV) particle comprising a second nucleotide sequence encoding an intein-C fused to the N-terminus of a C-terminal portion of the Cas9 protein or prime editor. The rAAV particles of the present disclosure comprise a rAAV vector (i.e., a recombinant genome of the rAAV) encapsidated in the viral capsid proteins.

[1152] In some embodiments, the rAAV vector comprises: (1) a heterologous nucleic acid region comprising the first or second nucleotide sequence encoding the N-terminal portion or C-terminal portion of a split Cas9 protein or a split prime editor in any form as described herein, (2) one or more nucleotide sequences comprising a sequence that facilitates expression of the heterologous nucleic acid region (e.g., a promoter), and (3) one or more nucleic acid regions comprising a sequence that facilitate integration of the heterologous nucleic acid region (optionally with the one or more nucleic acid regions comprising a sequence that facilitates expression) into the genome of a cell. In some embodiments, viral sequences that facilitate integration comprise Inverted Terminal Repeat (ITR) sequences. In some embodiments, the first or second nucleotide sequence encoding the N-terminal portion or C-terminal portion of a split Cas9 protein or a split prime editor is flanked on each side by an ITR sequence. In some embodiments, the nucleic acid vector further comprises a region encoding an AAV Rep protein as described herein, either contained within the region flanked by ITRs or outside the region. The ITR sequences can be derived from any AAV serotype (e.g., 1, 2, 3, 4, 5, 6, 7, 8, 9, or 10) or can be derived from more than one serotype. In some embodiments, the ITR sequences are derived from AAV2 or AAV6.

[1153] Thus, in some embodiments, the rAAV particles disclosed herein comprise at least one rAAV2 particle, rAAV6 particle, rAAV8 particle, rPHP.B particle, rPHP.eB particle, or rAAV9 particle, or a variant thereof. In particular embodiments, the disclosed rAAV particles are rPHP.B particles, rPHP.eB particles, rAAV9 particles.

[1154] ITR sequences and plasmids containing ITR sequences are known in the art and commercially available (see, e.g., products and services available from Vector Biolabs, Philadelphia, PA; Cellbiolabs, San Diego, CA; Agilent Technologies, Santa Clara, Ca; and Addgene, Cambridge, MA; and Gene delivery to skeletal muscle results in sustained expression and systemic delivery of a therapeutic protein. Kessler P D, Podsakoff G M, Chen X, McQuiston S A, Colosi P C, Matelis L A, Kurtzman G J, Byrne B J. Proc Natl Acad Sci USA. 1996 Nov. 26; 93(24):14082-7; and Curtis A. Machida. Methods in Molecular Medicine™. Viral Vectors for Gene Therapy Methods and Protocols. 10.1385/1-59259-304-6:201 © Humana Press Inc. 2003. Chapter 10. Targeted Integration by Adeno-Associated Virus. Matthew D. Weitzman, Samuel M. Young Jr., Toni Cathomen and Richard Jude Samulski; U.S. Pat. Nos. 5,139,941 and 5,962,313, all of which are incorporated herein by reference).

[1155] In some embodiments, the rAAV vector of the present disclosure comprises one or more regulatory elements to control the expression of the heterologous nucleic acid region (e.g., promoters, transcriptional terminators, and/or other regulatory elements). In some embodiments, the first and/or second nucleotide sequence is operably linked to one or more (e.g., 1, 2, 3, 4, 5, or more) transcriptional terminators. Non-limiting examples of transcriptional terminators that may be used in accordance with the present disclosure include transcription terminators of the bovine growth hormone gene (bGH), human growth hormone gene (hGH), SV40, CW3, ϕ, or combinations thereof. The efficiencies of several transcriptional terminators have been tested to determine their respective effects in the expression level of the split Cas9 protein or the split prime editor. In some embodiments, the transcriptional terminator used in the present disclosure is a bGH transcriptional terminator. In some embodiments, the rAAV vector further comprises a Woodchuck Hepatitis Virus Posttranscriptional Regulatory Element (WPRE). In certain embodiments, the WPRE is a truncated WPRE sequence, such as “W3.” In some embodiments, the WPRE is inserted 5′ of the transcriptional terminator. Such sequences, when transcribed, create a tertiary structure which enhances expression, in particular, from viral vectors.

[1156] In some embodiments, the vectors used herein may encode the PE fusion proteins, or any of the components thereof (e.g., napDNAbp, linkers, or polymerases). In addition, the vectors used herein may encode the PEgRNAs, and/or the accessory gRNA for second strand nicking. The vectors may be capable of driving expression of one or more coding sequences in a cell. In some embodiments, the cell may be a prokaryotic cell, such as, e.g., a bacterial cell. In some embodiments, the cell may be a eukaryotic cell, such as, e.g., a yeast, plant, insect, or mammalian cell. In some embodiments, the eukaryotic cell may be a mammalian cell. In some embodiments, the eukaryotic cell may be a rodent cell. In some embodiments, the eukaryotic cell may be a human cell. Suitable promoters to drive expression in different types of cells are known in the art. In some embodiments, the promoter may be wild-type. In other embodiments, the promoter may be modified for more efficient or efficacious expression. In yet other embodiments, the promoter may be truncated yet retain its function. For example, the promoter may have a normal size or a reduced size that is suitable for proper packaging of the vector into a virus.

[1157] In some embodiments, the promoters that may be used in the prime editor vectors may be constitutive, inducible, or tissue-specific. In some embodiments, the promoters may be a constitutive promoters. Non-limiting exemplary constitutive promoters include cytomegalovirus immediate early promoter (CMV), simian virus (SV40) promoter, adenovirus major late (MLP) promoter, Rous sarcoma virus (RSV) promoter, mouse mammary tumor virus (MMTV) promoter, phosphoglycerate kinase (PGK) promoter, elongation factor-alpha (EFla) promoter, ubiquitin promoters, actin promoters, tubulin promoters, immunoglobulin promoters, a functional fragment thereof, or a combination of any of the foregoing. In some embodiments, the promoter may be a CMV promoter. In some embodiments, the promoter may be a truncated CMV promoter. In other embodiments, the promoter may be an EFla promoter. In some embodiments, the promoter may be an inducible promoter. Non-limiting exemplary inducible promoters include those inducible by heat shock, light, chemicals, peptides, metals, steroids, antibiotics, or alcohol. In some embodiments, the inducible promoter may be one that has a low basal (non-induced) expression level, such as, e.g., the Tet-On® promoter (Clontech). In some embodiments, the promoter may be a tissue-specific promoter. In some embodiments, the tissue-specific promoter is exclusively or predominantly expressed in liver tissue. Non-limiting exemplary tissue-specific promoters include B29 promoter, CD14 promoter, CD43 promoter, CD45 promoter, CD68 promoter, desmin promoter, elastase-1 promoter, endoglin promoter, fibronectin promoter, Flt-1 promoter, GFAP promoter, GPIIb promoter, ICAM-2 promoter, INF-β promoter, Mb promoter, Nphsl promoter, OG-2 promoter, SP-B promoter, SYN1 promoter, and WASP promoter.

[1158] In some embodiments, the prime editor vectors (e.g., including any vectors encoding the prime editor fusion protein and/or the PEgRNAs, and/or the accessory second strand nicking gRNAs) may comprise inducible promoters to start expression only after it is delivered to a target cell. Non-limiting exemplary inducible promoters include those inducible by heat shock, light, chemicals, peptides, metals, steroids, antibiotics, or alcohol. In some embodiments, the inducible promoter may be one that has a low basal (non-induced) expression level, such as, e.g., the Tet-On® promoter (Clontech).

[1159] In additional embodiments, the prime editor vectors (e.g., including any vectors encoding the prime editor fusion protein and/or the PEgRNAs, and/or the accessory second strand nicking gRNAs) may comprise tissue-specific promoters to start expression only after it is delivered into a specific tissue. Non-limiting exemplary tissue-specific promoters include B29 promoter, CD14 promoter, CD43 promoter, CD45 promoter, CD68 promoter, desmin promoter, elastase-1 promoter, endoglin promoter, fibronectin promoter, Flt-1 promoter, GFAP promoter, GPIIb promoter, ICAM-2 promoter, INF-β promoter, Mb promoter, Nphsl promoter, OG-2 promoter, SP-B promoter, SYN1 promoter, and WASP promoter.

[1160] In some embodiments, the nucleotide sequence encoding the PEgRNA (or any guide RNAs used in connection with prime editing) may be operably linked to at least one transcriptional or translational control sequence. In some embodiments, the nucleotide sequence encoding the guide RNA may be operably linked to at least one promoter. In some embodiments, the promoter may be recognized by RNA polymerase III (Pol III). Non-limiting examples of Pol III promoters include U6, HI and tRNA promoters. In some embodiments, the nucleotide sequence encoding the guide RNA may be operably linked to a mouse or human U6 promoter. In other embodiments, the nucleotide sequence encoding the guide RNA may be operably linked to a mouse or human HI promoter. In some embodiments, the nucleotide sequence encoding the guide RNA may be operably linked to a mouse or human tRNA promoter. In embodiments with more than one guide RNA, the promoters used to drive expression may be the same or different. In some embodiments, the nucleotide encoding the crRNA of the guide RNA and the nucleotide encoding the tracr RNA of the guide RNA may be provided on the same vector. In some embodiments, the nucleotide encoding the crRNA and the nucleotide encoding the tracr RNA may be driven by the same promoter. In some embodiments, the crRNA and tracr RNA may be transcribed into a single transcript. For example, the crRNA and tracr RNA may be processed from the single transcript to form a double-molecule guide RNA. Alternatively, the crRNA and tracr RNA may be transcribed into a single-molecule guide RNA.

[1161] In some embodiments, the nucleotide sequence encoding the guide RNA may be located on the same vector comprising the nucleotide sequence encoding the PE fusion protein. In some embodiments, expression of the guide RNA and of the PE fusion protein may be driven by their corresponding promoters. In some embodiments, expression of the guide RNA may be driven by the same promoter that drives expression of the PE fusion protein. In some embodiments, the guide RNA and the PE fusion protein transcript may be contained within a single transcript. For example, the guide RNA may be within an untranslated region (UTR) of the Cas9 protein transcript. In some embodiments, the guide RNA may be within the 5′ UTR of the PE fusion protein transcript. In other embodiments, the guide RNA may be within the 3′ UTR of the PE fusion protein transcript. In some embodiments, the intracellular half-life of the PE fusion protein transcript may be reduced by containing the guide RNA within its 3′ UTR and thereby shortening the length of its 3′ UTR. In additional embodiments, the guide RNA may be within an intron of the PE fusion protein transcript. In some embodiments, suitable splice sites may be added at the intron within which the guide RNA is located such that the guide RNA is properly spliced out of the transcript. In some embodiments, expression of the Cas9 protein and the guide RNA in close proximity on the same vector may facilitate more efficient formation of the CRISPR complex.

[1162] The prime editor vector system may comprise one vector, or two vectors, or three vectors, or four vectors, or five vector, or more. In some embodiments, the vector system may comprise one single vector, which encodes both the PE fusion protein and PEgRNA. In other embodiments, the vector system may comprise two vectors, wherein one vector encodes the PE fusion protein and the other encodes the PEgRNA. In additional embodiments, the vector system may comprise three vectors, wherein the third vector encodes the second strand nicking gRNA used in the herein methods.

[1163] In some embodiments, the composition comprising the rAAV particle (in any form contemplated herein) further comprises a pharmaceutically acceptable carrier. In some embodiments, the composition is formulated in appropriate pharmaceutical vehicles for administration to human or animal subjects.

[1164] Some examples of materials which can serve as pharmaceutically-acceptable carriers include: (1) sugars, such as lactose, glucose and sucrose; (2) starches, such as corn starch and potato starch; (3) cellulose, and its derivatives, such as sodium carboxymethyl cellulose, methylcellulose, ethyl cellulose, microcrystalline cellulose and cellulose acetate; (4) powdered tragacanth; (5) malt; (6) gelatin; (7) lubricating agents, such as magnesium stearate, sodium lauryl sulfate and talc; (8) excipients, such as cocoa butter and suppository waxes; (9) oils, such as peanut oil, cottonseed oil, safflower oil, sesame oil, olive oil, corn oil and soybean oil; (10) glycols, such as propylene glycol; (11) polyols, such as glycerin, sorbitol, mannitol and polyethylene glycol (PEG); (12) esters, such as ethyl oleate and ethyl laurate; (13) agar; (14) buffering agents, such as magnesium hydroxide and aluminum hydroxide; (15) alginic acid; (16) pyrogen-free water; (17) isotonic saline; (18) Ringer's solution; (19) ethyl alcohol; (20) pH buffered solutions; (21) polyesters, polycarbonates and/or polyanhydrides; (22) bulking agents, such as polypeptides and amino acids (23) serum component, such as serum albumin, HDL and LDL; (22) C2-C12 alcohols, such as ethanol; and (23) other non-toxic compatible substances employed in pharmaceutical formulations. Wetting agents, coloring agents, release agents, coating agents, sweetening agents, flavoring agents, perfuming agents, preservative and antioxidants can also be present in the formulation. The terms such as “excipient”, “carrier”, “pharmaceutically acceptable carrier” or the like are used interchangeably herein.

### Delivery Methods

[1165] In some aspects, the invention provides methods comprising delivering one or more polynucleotides, such as or one or more vectors as described herein, one or more transcripts thereof, and/or one or proteins transcribed therefrom, to a host cell. In some aspects, the invention further provides cells produced by such methods, and organisms (such as animals, plants, or fungi) comprising or produced from such cells. In some embodiments, a base editor as described herein in combination with (and optionally complexed with) a guide sequence is delivered to a cell.

[1166] Exemplary delivery strategies are described herein elsewhere, which include vector-based strategies, PE ribonucleoprotein complex delivery, and delivery of PE by mRNA methods.

[1167] In some embodiments, the method of delivery provided comprises nucleofection, microinjection, biolistics, virosomes, liposomes, immunoliposomes, polycation or lipid:nucleic acid conjugates, naked DNA, artificial virions, and agent-enhanced uptake of DNA.

[1168] Exemplary methods of delivery of nucleic acids include lipofection, nucleofection, electoporation, stable genome integration (e.g., piggybac), microinjection, biolistics, virosomes, liposomes, immunoliposomes, polycation or lipid:nucleic acid conjugates, naked DNA, artificial virions, and agent-enhanced uptake of DNA. Lipofection is described in e.g., U.S. Pat. Nos. 5,049,386, 4,946,787; and 4,897,355) and lipofection reagents are sold commercially (e.g., Transfectam™, Lipofectin™ and SF Cell Line 4D-Nucleofector X Kit™ (Lonza)). Cationic and neutral lipids that are suitable for efficient receptor-recognition lipofection of polynucleotides include those of Feigner, WO 91/17424; WO 91/16024. Delivery may be to cells (e.g. in vitro or ex vivo administration) or target tissues (e.g. in vivo administration). Delivery may be achieved through the use of RNP complexes.

[1169] The preparation of lipid:nucleic acid complexes, including targeted liposomes such as immunolipid complexes, is well known to one of skill in the art (see, e.g., Crystal, Science 270:404-410 (1995); Blaese et al., Cancer Gene Ther. 2:291-297 (1995); Behr et al., Bioconjugate Chem. 5:382-389 (1994); Remy et al., Bioconjugate Chem. 5:647-654 (1994); Gao et al., Gene Therapy 2:710-722 (1995); Ahmad et al., Cancer Res. 52:4817-4820 (1992); U.S. Pat. Nos. 4,186,183, 4,217,344, 4,235,871, 4,261,975, 4,485,054, 4,501,728, 4,774,085, 4,837,028, and 4,946,787).

[1170] In other embodiments, the method of delivery and vector provided herein is an RNP complex. RNP delivery of fusion proteins markedly increases the DNA specificity of base editing. RNP delivery of fusion proteins leads to decoupling of on- and off-target DNA editing. RNP delivery ablates off-target editing at non-repetitive sites while maintaining on-target editing comparable to plasmid delivery, and greatly reduces off-target DNA editing even at the highly repetitive VEGFA site 2. See Rees, H. A. et al., Improving the DNA specificity and applicability of base editing through protein engineering and protein delivery, Nat. Commun. 8, 15790 (2017), U.S. Pat. No. 9,526,784, issued Dec. 27, 2016, and U.S. Pat. No. 9,737,604, issued Aug. 22, 2017, each of which is incorporated by reference herein.

[1171] Additional methods for the delivery of nucleic acids to cells are known to those skilled in the art. See, for example, US 2003/0087817, incorporated herein by reference.

[1172] Other aspects of the present disclosure provide methods of delivering the prime editor constructs into a cell to form a complete and functional prime editor within a cell. For example, in some embodiments, a cell is contacted with a composition described herein (e.g., compositions comprising nucleotide sequences encoding the split Cas9 or the split prime editor or AAV particles containing nucleic acid vectors comprising such nucleotide sequences). In some embodiments, the contacting results in the delivery of such nucleotide sequences into a cell, wherein the N-terminal portion of the Cas9 protein or the prime editor and the C-terminal portion of the Cas9 protein or the prime editor are expressed in the cell and are joined to form a complete Cas9 protein or a complete prime editor.

[1173] It should be appreciated that any rAAV particle, nucleic acid molecule or composition provided herein may be introduced into the cell in any suitable way, either stably or transiently. In some embodiments, the disclosed proteins may be transfected into the cell. In some embodiments, the cell may be transduced or transfected with a nucleic acid molecule. For example, a cell may be transduced (e.g., with a virus encoding a split protein), or transfected (e.g., with a plasmid encoding a split protein) with a nucleic acid molecule that encodes a split protein, or an rAAV particle containing a viral genome encoding one or more nucleic acid molecules. Such transduction may be a stable or transient transduction. In some embodiments, cells expressing a split protein or containing a split protein may be transduced or transfected with one or more guide RNA sequences, for example in delivery of a split Cas9 (e.g., nCas9) protein. In some embodiments, a plasmid expressing a split protein may be introduced into cells through electroporation, transient (e.g., lipofection) and stable genome integration (e.g., piggybac) and viral transduction or other methods known to those of skill in the art.

[1174] In certain embodiments, the compositions provided herein comprise a lipid and/or polymer. In certain embodiments, the lipid and/or polymer is cationic. The preparation of such lipid particles is well known. See, e.g. U.S. Pat. Nos. 4,880,635; 4,906,477; 4,911,928; 4,917,951; 4,920,016; 4,921,757; and 9,737,604, each of which is incorporated herein by reference.

[1175] The guide RNA sequence may be 15-100 nucleotides in length and comprise a sequence of at least 10, at least 15, or at least 20 contiguous nucleotides that is complementary to a target nucleotide sequence. The guide RNA may comprise a sequence of 15, 16, 17, 18, 19, 20, 21, 22, 23, 24, 25, 26, 27, 28, 29, 30, 31, 32, 33, 34, 35, 36, 37, 38, 39, or 40 contiguous nucleotides that is complementary to a target nucleotide sequence. The guide RNA may be 15, 16, 17, 18, 19, 20, 21, 22, 23, 24, 25, 26, 27, 28, 29, 30, 31, 32, 33, 34, 35, 36, 37, 38, 39, 40, 41, 42, 43, 44, 45, 46, 47, 48, 49, or 50 nucleotides in length.

[1176] In some embodiments, the target nucleotide sequence is a DNA sequence in a genome, e.g. a eukaryotic genome. In certain embodiments, the target nucleotide sequence is in a mammalian (e.g. a human) genome.

[1177] The compositions of this disclosure may be administered or packaged as a unit dose, for example. The term “unit dose” when used in reference to a pharmaceutical composition of the present disclosure refers to physically discrete units suitable as unitary dosage for the subject, each unit containing a predetermined quantity of active material calculated to produce the desired therapeutic effect in association with the required diluent, i.e., a carrier or vehicle.

[1178] Treatment of a disease or disorder includes delaying the development or progression of the disease, or reducing disease severity. Treating the disease does not necessarily require curative results.

[1179] As used therein, “delaying” the development of a disease means to defer, hinder, slow, retard, stabilize, and/or postpone progression of the disease. This delay can be of varying lengths of time, depending on the history of the disease and/or individuals being treated. A method that “delays” or alleviates the development of a disease, or delays the onset of the disease, is a method that reduces probability of developing one or more symptoms of the disease in a given time frame and/or reduces extent of the symptoms in a given time frame, when compared to not using the method. Such comparisons are typically based on clinical studies, using a number of subjects sufficient to give a statistically significant result.

[1180] “Development” or “progression” of a disease means initial manifestations and/or ensuing progression of the disease. Development of the disease can be detectable and assessed using standard clinical techniques as well known in the art. However, development also refers to progression that may be undetectable. For purpose of this disclosure, development or progression refers to the biological course of the symptoms. “Development” includes occurrence, recurrence, and onset.

[1181] As used herein “onset” or “occurrence” of a disease includes initial onset and/or recurrence. Conventional methods, known to those of ordinary skill in the art of medicine, can be used to administer the isolated polypeptide or pharmaceutical composition to the subject, depending upon the type of disease to be treated or the site of the disease.

[1182] Without further elaboration, it is believed that one skilled in the art can, based on the above description, utilize the present disclosure to its fullest extent. The following specific embodiments are, therefore, to be construed as merely illustrative, and not limitative of the remainder of the disclosure in any way whatsoever. All publications cited herein are incorporated by reference for the purposes or subject matter referenced herein.

### EXAMPLES

### Example 1. Prime Editing (Pe) for Installing Precise Nucleotide Changes in the Genome

[1183] The objective is to develop a transformative genome editing technology for precise and general installation of single nucleotide changes in mammalian genomes. This technology would allow investigators to study the effects of single nucleotide variations in virtually any mammalian gene, and potentially enable therapeutic interventions for correcting pathogenic point mutations in human patients.

[1184] Adoption of the clustered regularly interspaced short palindromic repeat (CRISPR) system for genome editing has revolutionized the life sciences¹⁻³. Although gene disruption using CRISPR is now routine, the precise installation of single nucleotide edits remains a major challenge, despite being necessary for studying or correcting a large number of disease-causative mutations. Homology directed repair (HDR) is capable of achieving such edits, but suffers from low efficiency (often <5%), a requirement for donor DNA repair templates, and deleterious effects of double-stranded DNA break (DSB) formation. Recently, the Liu laboratory developed base editing, which achieves efficient single nucleotide editing without DSB s. Base editors (BEs) combine the CRISPR system with base-modifying deaminase enzymes to convert target C●G or A●T base pairs to A●T or G●C, respectively⁴⁻⁶. Although already widely used by researchers worldwide (>5,000 Liu lab BE constructs distributed by Addgene), current BEs enable only four of the twelve possible base pair conversions and are unable to correct small insertions or deletions. Moreover, the targeting scope of base editing is limited by the editing of non-target C or A bases adjacent to the target base (“bystander editing”) and by the requirement that a PAM sequence exist 15±2 bp from the target base. Overcoming these limitations would therefore greatly broaden the basic research and therapeutic applications of genome editing.

[1185] Here, it is proposed to develop a new precision editing approach that offers many of the benefits of base editing—namely, avoidance of double strand breaks and donor DNA repair templates—while overcoming its major limitations. To achieve this ambitious goal, it is aimed to directly install edited DNA strands at target genomic sites using target-primed reverse transcription (TPRT). In the design discussed herein, CRISPR guide RNA (gRNA) will be engineered to carry a template encoding mutagenic DNA strand synthesis, to be executed by an associated reverse transcriptase (RT) enzyme. The CRISPR nuclease (Cas9)-nicked target site DNA will serve as the primer for reverse transcription, allowing for direct incorporation of any desired nucleotide edit.

### Section 1

[1186] Establish guide RNA-templated reverse transcription of mutagenic DNA strands. Prior studies have shown that, following DNA cleavage but prior to complex dissociation, Cas9 releases the non-target DNA strand to expose a free 3′ terminus. It is hypothesized that this DNA strand is accessible to extension by polymerase enzymes, and that gRNAs can be engineered through extension of their 5′ or 3′ terminus to serve as templates for DNA synthesis. In preliminary in vitro studies, it was established that nicked DNA strands within Cas9:gRNA-bound complexes can indeed prime reverse transcription using the bound gRNA as a template (RT enzyme in trans). Next, different gRNA linkers, primer binding sites, and synthesis templates will be explored to determine optimal design rules in vitro. Then, different RT enzymes, acting in trans or as fusions to Cas9, will be evaluated in vitro. Finally, engineered gRNA designs will be identified that retain efficient binding and cutting activity in cells. Successful demonstration of this aim will provide a foundation for carrying out mutagenic strand synthesis in cells.

### Section 2

[1187] Establish prime editing in human cells. Based on DNA processing and repair mechanisms, it is hypothesized that mutagenic DNA strands (single stranded flaps) can be used to direct specific and efficient editing of target nucleotides. In encouraging preliminary studies, feasibility for this strategy was established by demonstrating editing with model plasmid substrates containing mutagenic flaps. Concurrent with Aim 1, repair outcomes will be further evaluated by systematically varying the mutagenic flap's length, sequence composition, target nucleotide identity, and 3′ terminus. Small 1 to 3 nucleotide insertions and deletions will also be tested. In parallel, and building from Aim 1, Cas9-RT architectures will be evaluated, including fusion proteins and non-covalent recruitment strategies. Cas9-RT architectures and extended gRNAs will be assayed for cellular editing at multiple target sites in the human genome, and will then be optimized for high efficiency. If successful, this aim would immediately establish TPRT genome editing (i.e., prime editing) for basic science applications.

### Section 3

[1188] Achieve site-specific editing of pathogenic mutations in cultured human cells. The potential generality of this technology could enable editing of transversion mutations and indels that are not currently correctable by BEs. Guided by the results of Aim 1 and Aim 2, pathogenic transversion mutations will be targeted in cultured human cells, including the sickle cell disease founder mutation in beta globin (requires an A●T to TA transversion to correct) and the most prevalent Wilson's disease mutation in ATP7B (requires a GC to TA transversion to correct). The correction of small insertion and deletion mutations will also be examined, including the 3-nucleotide AF508 deletion in CFTR that causes cystic fibrosis. If successful, this would lay the foundation for developing powerful therapeutic approaches that address these important human diseases.

### Approach

[1189] The objective is to develop a genome editing strategy that directly installs point mutations at targeted genomic sites. In the technology development phase, efforts will focus on protein and RNA engineering to incorporate TPRT functionality into the CRISPR/Cas system. In vitro assays will be used to carefully probe the function of each step of TPRT, building from the ground up (Aim 1). The second focus area will evaluate editing outcomes in mammalian cells using a combination of model substrates and engineered CRISPR/Cas systems (Aim 2). Finally, the application phase will use the technology to correct mutations that have been intractable to genome editing by other methods (Aim 3).

[1190] The general editing design is shown in FIGS. 1A-1B. Cas9 nickases contain inactivating mutations to the HNH nuclease domain (Spy Cas9 H840A or N863A), restricting DNA cleavage to the PAM containing strand (non-target strand). Guide RNAs (gRNAs) are engineered to contain a template for reverse transcription (designs detailed on slide 5). Shown is a 5′ extension of the gRNA, but 3′ extensions can also be implemented. The Cas9 nickase is fused to a reverse transcriptase (RT) enzyme, either through the C-terminus or N-terminus. The gRNA:Cas9-RT complex targets the DNA region of interest and forms an R loop after displacing the non-target strand. Cas9 nicks the non-target DNA strand. Release of the nicked strand exposes a free 3′-OH terminus that is competent to prime reverse transcription using the extended gRNA as a template. This DNA synthesis reaction is carried out by the fused RT enzyme. The gRNA template encodes a DNA sequence that is homologous to the original DNA duplex, with the exception of the nucleotide that is targeted for editing. The product of reverse transcription is a single stranded DNA flap that encodes the desired edit. This flap, which contains a free 3′ terminus, can equilibrate with the adjacent DNA strand, resulting in a 5′ flap species. The latter species is hypothesized to serve as an efficient substrate for FEN1 (flap endonuclease 1), an enzyme that naturally excises 5′ flaps from Okazaki fragments during lagging strand DNA synthesis, and removes 5′ flaps following strand displacement synthesis that occurs during long-patch base excision repair. Ligation of the nicked DNA produces a mismatched base pair. This intermediate could either undergo reversion to the original base pair or conversion to the desired edited base pair via mismatch repair (MMR) processes. Alternatively, semiconservative DNA replication could give rise to one copy each of the reversion and edit.

### 1. Establish Guide RNA-Templated Reverse Transcription of Mutagenic DNA Strands.

[1191] Background and Rationale

[1192] In the proposed genome editing strategy, the Cas9-nicked non-target DNA strand (PAM-containing strand that forms the R-loop) acts as the primer for DNA synthesis. It is hypothesized that this is possible based on several pieces of biochemical and structural data. Nuclease protection experiments³², crystallographic studies³³, and base editing windows_{4,24} have demonstrated a large degree of flexibility and disorder for the non-target strand nucleotides −20 through −10 within the so-called R-loop of the Cas9-bound complex (numbering indicates distance 5′ from first PAM nucleotide). Moreover, the PAM-distal portion of the cleaved non-target strand can be displaced from tightly bound ternary complexes when complementary ssDNA is added in trans²⁰. These studies support that the non-target strand is highly flexible, is accessible to enzymes, and that after nicking, the 3′ terminus of the PAM-distal fragment is released prior to Cas9 dissociation. Furthermore, it is hypothesized that gRNAs can be extended to template DNA synthesis. Prior studies have shown that gRNAs for SpCas9, SaCas9, and LbCas12a (formerly Cpf1) tolerate gRNA extensions with RNA aptamers³⁴, ligand-inducible self-cleaving ribozymes³⁵, and long non-coding RNAs³⁶. This literature establishes precedent for two major features that will be exploited. In assessing this strategy, several CRISPR-Cas systems will be evaluated in conjunction with 5′ and 3′ extended gRNA designs using a combination of in vitro and cellular assays (FIGS. 2A-2C).

[1193] Designs for engineered gRNAs for TRT editing are shown in FIGS. 3A-3B. DNA synthesis proceeds 5′ to 3′, and thus copies the RNA template in the 3′ to 5′ direction. The design for the 5′ extension contains a linker region, a primer binding site where the nicked DNA strand anneals, and a template for DNA synthesis by reverse transcription. The 3′ extended gRNA contains a primer binding site and a reverse transcription template. In some cases, the 3′ RNA hairpin of the gRNA core is modified to match the DNA target sequence, as in vitro experiments showed that reverse transcription extends ˜3 nucleotides into the gRNA core for the 3′ extended gRNA constructs (modification of the hairpin sequence appears well tolerated so long as compensatory changes are made that maintain the hairpin RNA structure). DNA synthesis proceed 5′ to 3′, with nucleotides added to the 3′ OH of the growing DNA strand.

[1194] Preliminary Results

[1195] Cas9 nicked DNA primes reverse transcription of gRNA templates. To evaluate the accessibility of the nicked non-target DNA strand, in vitro biochemical assays were performed using the Cas9 nuclease from S. pyogenes (SpCas9) and Cy5 fluorescently labeled duplex DNA substrates (51 base pairs). First, a series of gRNAs containing 5′ extensions with varying synthesis template lengths were prepared by in vitro transcription (overall design shown in FIG. 2B). Electrophoretic mobility shift assays (EMSA) with nuclease dead Cas9 (dCas9) established that 5′ extended gRNAs maintain target binding affinity (data not shown). Next, TPRT activity was tested on pre-nicked Cy5-labeled duplex DNA substrates using dCas9, 5′-extended gRNAs, and Molony-Murine Leukemia Virus (M-MLV) reverse transcriptase (Superscript III). After 1 hour of incubation at 37° C., products were evaluated by denaturing polyacrylamide gel electrophoresis (PAGE) and imaged using Cy5 fluorescence (FIG. 4A). Each 5′-extended gRNA variant led to significant product formation, with the observed DNA product sizes being consistent with the length of the extension template (FIG. 4B). Importantly, in the absence of dCas9, pre-nicked substrates were extended to the full 51-bp length of the DNA substrate, strongly suggesting that the complementary DNA strand, and not the gRNA, was used as the template for DNA synthesis when dCas9 was not present (FIG. 4C). Of note, the system was designed such that the newly synthesized DNA strand mirrors the product that would be required for target site editing (a homologous strand with a single nucleotide change). This result establishes that Cas9:gRNA binding exposes the nicked non-target strand's 3′ end, and that the non-target strand is accessible to reverse transcription.

[1196] Next, non-nicked dsDNA substrates were evaluated using the Cas9(H840A) mutant, which nicks the non-target DNA strand. First, to test Cas9(H840A) nickase activity with 5′-extended gRNAs, in vitro cleavage assays were performed as previously described³⁷. Although nicking was impaired by comparison to the standard gRNA, appreciable cleavage products were formed (FIG. 4D). Importantly, RT products were also observed when TPRT reactions were carried out with 5′-extended gRNAs and Cas9(H840A), albeit at lower yields that are likely explained by the decreased nicking activity (FIG. 4D). This result establishes that 5′-extended gRNA:Cas9(H840A) complexes can nick DNA and template reverse transcription.

[1197] Finally, 3′ gRNA extensions were evaluated for Cas9(H840A) nicking and TPRT. By comparison to 5′-extended gRNAs, DNA cleavage by 3′-extended gRNAs was not impaired to any detectable extent compared to the standard gRNA. Significantly, 3′-extended gRNA templates also supported efficient reverse transcription with both pre-nicked and intact duplex DNA substrates when M-MLV RT was supplied in trans (FIG. 4E). Surprisingly, only a single product was observed for 3′-extended templates, indicating that reverse transcription terminates at a specific location along the gRNA scaffold. Homopolymer tailing of the product with terminal transferase followed by Klenow extension and Sanger sequencing revealed that the full gRNA synthesis template was copied in addition to the terminal 3 nucleotides of the gRNA core. In the future, the flap terminus will be reprogrammed by modifying the terminal gRNA sequence^{38,39}. This result demonstrates that 3′-extended gRNAs can serve as efficient nuclease targeting guides and can template reverse transcription.

[1198] Cas9-TPRT uses nicked DNA and gRNA in cis. Dual color experiments were used to determine if the RT reaction preferentially occurs with the gRNA in cis (bound in the same complex) (see FIG. 8). Two separate experiments were conducted for 5′-extended and 3′-extended gRNAs. For a given experiment, ternary complexes of dCas9, gRNA, and DNA substrate were formed in separate tubes. In one tube, the gRNA encodes a long RT product and the DNA substrate is labeled with Cy3 (red); in the other, the gRNA encodes a short RT product and the DNA substrate is labeled with Cy5 (blue). After short incubations, the complexes were mixed and then treated with RT enzyme and dNTPs. Products were separated by urea-denaturing PAGE and visualized by fluorescence in the Cy3 and Cy5 channels. Reaction products were found to preferentially form using the gRNA template that was pre-complexed with the DNA substrate, indicating that the RT reaction likely can occur in cis. This results supports that a single Cas9:gRNA complex can target a DNA site and template reverse transcription of a mutagenic DNA strand.

Testing TPRT with Other Cas Systems

[1199] Similar experiments to those presented in the previous sections will be carried out using other Cas systems, including Cas9 from S. aureus and Cas12a from L. bacterium (see FIGS. 2A-2C). If TRPT can also be demonstrated for these Cas variants, the potential editing scope and likelihood of overall success in cells would increase.

Testing TPRT with RT-Cas9 Fusion Proteins

[1200] A series of commercially available or purifiable RT enzymes will first be evaluated in trans for TPRT activity. In addition to the already tested RT from M-MLV, the RT from Avian Myeloblastosis Virus (AMV), the Geobacillus stearothermophilus Group II Intron (GsI-IIC)^{41,42}, and the Eubacterium rectale group II intron (Eu.re.I2)^{43,44} will be evaluated. Significantly, the latter two RTs perform TPRT in their natural biological contexts. Where relevant, RNAse inactivating mutations and other potentially beneficial RT enzyme modifications will be tested. Once functional RTs are identified when supplied in trans, each will be evaluated as a fusion protein to Cas9 variants. Both N-terminus and C-terminus fusion orientations will be tested, along with various linker lengths and architectures. Kinetic time course experiments will be used to determine whether TPRT can occur using the RT enzyme in cis. If an RT-Cas9 fusion architecture can be constructed that allows for efficient TPRT chemistry, this will greatly increase the likelihood of functional editing in the context of a cell.

Cas9 Targeting with Engineered gRNAs in Cells

[1201] Candidate engineered gRNAs developed in the previous sub-aims will be evaluated in human cell culture experiments (HEK293) to confirm Cas9 targeting efficiency. Using established indel formation assays employing wild type SpCas9⁴⁵, engineered gRNAs will be compared side-by-side with standard gRNAs across 5 or more sites in the human genome. Genome editing efficiency will be characterized by amplicon sequencing in multiplex using the Illumina MiSeq platform housed in the laboratory. It is anticipated that results from this and the preceding sections will generate insights that inform subsequent iterations of the design-build-test cycle, where gRNAs can be optimized for both templating reverse transcription and efficient Cas9 targeting in cells.

[1202] Results of in vitro validations are shown in FIGS. 5-7. In vitro experiments demonstrated that the nicked non-target DNA strand is flexible and available for priming DNA synthesis, and that the gRNA extension can serve as a template for reverse transcription (see FIG. 5). This set of experiments used 5′-extended gRNAs (designed as shown in FIGS. 3A-3B) with varying length synthesis templates (listed to the left). Fluorescently labeled (Cy5) DNA targets were used as substrates, and were pre-nicked in this set of experiments. The Cas9 used in these experiments is catalytically dead Cas9 (dCas9), so cannot cut DNA but can still bind efficiently. Superscript III, a commercial RT derived from the Moloney-Murine Leukemia Virus (M-MLV), was supplied in trans. First, dCas9:gRNA complexes were formed from purified components. Then, the fluorescently labeled DNA substrate was added along with dNTPs and the RT enzyme. After 1 hour of incubation at 37 C, the reaction products were analyzed by denaturing urea-polyacrylamide gel electrophoresis (PAGE). The gel image shows extension of the original DNA strand to lengths that are consistent with the length of the reverse transcription template. Of note, reactions carried out in the absence of dCas9 produced DNA products of length 51 nucleotides, regardless of the gRNA used. This product corresponds to use of the complementary DNA strand as the template for DNA synthesis and not the RNA (data not shown). Thus, Cas9 binding is required for directing DNA synthesis to the RNA template. This set of in vitro experiments closely parallels those shown in FIG. 5, except that the DNA substrate is not pre-nicked, and a Cas9 nickase (SpyCas9 H840A mutant) is used. As shown in the gel, the nickase efficiently cleaves the DNA strand when the standard gRNA is used (gRNA_0, lane 3). Multiple cleavage products are observed, consistent with prior biochemical studies of SpyCas9. The 5′ extension impairs nicking activity (lanes 4-8), but some RT product is still observed. FIG. 7 shows that 3′ extensions support DNA synthesis and do not significantly effect Cas9 nickase activity. Pre-nicked substrates (black arrow) are near-quantitatively converted to RT products when either dCas9 or Cas9 nickase is used (lanes 4 and 5). Greater than 50% conversion to the RT product (white arrow) is observed with full substrates (lane 3). To determine the length and sequence of the RT product, the product band was excised from the gel, extracted, and sequenced. This revealed that RT extended 3 nucleotides into the gRNA core's 3′ terminal hairpin. Subsequent experiments (not shown) demonstrated that these three nucleotides could be changed to match target DNA sequences, so long as complementary changes were made that maintain the hairpin RNA structure.

### Potential Difficulties and Alternatives

[1203] (1) RT does not function as a fusion: molecular crowding and/or unfavorable geometries could encumber polymerase extension by Cas9-fused RT enzymes. First, linker optimization can be tested. Circularly permutated variants of Cas9, which could re-orient the spatial relationship between the DNA primer, gRNA, and RT enzyme, will be evaluated. Non-covalent RT recruitment strategies as detailed in Aim 2 can be tested. (2) Decreased Cas targeting efficiency by extended gRNA variants: this is most likely to be an issue for 5′-extended gRNAs. Based on structural data²⁴, Cas9 mutants can be designed and screened to identify variants with greater tolerance to gRNA extension. In addition, gRNA libraries could be screened in cells for linkers that improve targeting activity.

[1204] Significance

[1205] These preliminary results establish that Cas9 nickases and extended gRNAs can initiate target-primed reverse transcription on bound DNA targets using a reverse transcriptase supplied in trans. Importantly, Cas9 binding was found to be critically important for product formation. Though perhaps not an absolute requirement for genome editing in cells, further development of the system that incorporates RT enzyme function in cis would significantly increase the likelihood of success in cell-based applications. Achievement of the remaining aspects of this Aim would provide a molecular foundation for carrying out precision genome editing in the context of the human genome.

### 2. Establish Prime Editing in Human Cells.

[1206] Background and Rationale

[1207] In the proposed strategy, an engineered RT-Cas9:gRNA complex will introduce mutagenic 3′ DNA flaps at genomic target sites. It is hypothesized that mutagenic 3′ flaps containing a single mismatch will be incorporated by the DNA repair machinery through energetically accessible equilibration with adjacent 5′ flaps, which would be preferentially removed (FIGS. 1C-1D). The DNA replication and repair machineries encounter 5′ ssDNA flaps when processing Okazaki fragments⁴⁶ and during long-patch base excision repair (LP-BER)⁴⁷. 5′ flaps are the preferred substrates for the widely expressed flap endonuclease FEN1, which is recruited to DNA repair sites by the homotrimeric sliding clamp complex PCNA⁴⁸. PCNA also serves as a scaffold for simultaneous recruitment of other repair factors including the DNA ligase Lig1⁴⁹. Acting as a ‘toolbelt’, PCNA accelerates serial flap cleavage and ligation, which is essential to processing the millions of Okazaki fragments generated during every cell division^{50,51}. Based on resemblance to these natural DNA intermediates, it is hypothesized that mutagenic strands would be incorporated through equilibration with 5′ flaps, followed by coordinated 5′ flap excision and ligation. Mismatch repair (MMR) should then occur on either strand with equal probability, leading to editing or reversion (FIGS. 1C-1D). Alternatively, DNA replication could occur first and lead directly to the incorporation of the edit in the newly synthesized daughter strand. While the highest expected yield from this process is 50%, multiple substrate editing attempts could drive the reaction toward completion due to the irreversibility of editing repair.

[1208] Preliminary Result

[1209] DNA flaps induce site-specific mutagenesis in plasmid model substrates in yeast and HEK cells. To test the proposed editing strategy, studies were initiated with model plasmid substrates containing mutagenic 3′ flaps that resemble the product of TPRT. A dual fluorescent protein reporter was created that encodes a stop codon between GFP and mCherry. Mutagenic flaps encode a correction to the stop codon (FIG. 9A), enabling mCherry synthesis. Thus, mutagenesis efficiency can be quantified by GFP:mCherry ratios. Plasmid substrates were prepared in vitro and introduced into yeast (S. cerevisiae) or human cells (HEK293). High frequency mutagenesis was observed in both systems (FIG. 9B), and isolated yeast colonies contained either the reverted base, the mutated base, or a mixture of both products (FIG. 9C). Detection of the latter suggests that plasmid replication occurred prior to MMR in these cases, and further suggests that flap excision and ligation precede MMR. This result establishes the feasibility of DNA editing using 3′ mutagenic strands.

[1210] Systematic Studies with Model Flap Substrates

[1211] Based on the preliminary results described above, a broader spectrum of flap substrates will be evaluated in HEK cells to infer principles of efficient editing. 3′ ssDNA flaps will be systematically varied to determine the influence of mismatch pairings, the location of the mutagenic nucleotide along the flap, and the identity of the terminal nucleotide (FIG. 9D). Single nucleotide insertions and deletions will also be tested. Amplicon sequencing will be used to analyze editing precision. These results will help inform the design of gRNA reverse transcription templates.

[1212] In vitro TPRT on plasmid substrates leads to efficient editing outcomes. TPRT reactions developed in Aim 1 were used to induce mutagenesis within a plasmid substrate. The reaction was carried out on circular DNA plasmid substrates (see FIG. 10). This rules out the possibility of DNA strand dissociation as the mechanism for RT extension in the previous in vitro experiments. It also allowed for the testing of DNA repair of flap substrates in cells. A dual-fluorescent reporter plasmid was constructed for yeast (S. cerevisiae) expression. This plasmid encodes GFP (green fluorescent protein) and mCherry (red fluorescent protein) with an intervening stop codon (TGA). Expression of this construct in yeast produces only GFP. The plasmid was used as a substrate for in vitro TRT [Cas9(H840A) nickase, engineered gRNA, MLV RT enzyme, dNTPS]. The gRNA extension encodes a mutation to the stop codon. The flap strand is used for repair of the stop codon and it is anticipated to produce a plasmid that expresses both GFP and mCherry as a fusion protein. Yeast dual-FP plasmid transformants are shown in FIG. 10. Transforming the parent plasmid or an in vitro Cas9(H840A) nicked plasmid results in only green GFP expressing colonies. TRT reaction with 5′-extended or 3′-extended gRNAs produces a mix of green and yellow colonies. The latter express both GFP and mCherry. More yellow colonies are observed with the 3′-extended gRNA. A positive control that contains no stop codon is shown as well.

[1213] This result establishes that long double stranded substrates can undergo TPRT, and that TPRT products induce editing in eukaryotic cells.

[1214] Another experiment similar to the foregoing prime editing experiment was carried out, but instead of installing a point mutation in the stop codon, TRT editing installs a single nucleotide insertion (left) or deletion (right) that repairs a frameshift mutation and allows for synthesis of downstream mCherry (see FIG. 11). Both experiments used 3′ extended gRNAs. Individual colonies from the TRT transformations were selected and analyzed by Sanger sequencing (see FIG. 12). Green colonies contained plasmids with the original DNA sequence, while yellow colonies contained the precise mutation designed by the TRT editing gRNA. No other point mutations or indels were observed.

### Establish Prime Editing in HEK Cells Using RT-Cas9 Architectures

[1215] The optimized constructs from previous aims will be adapted for mammalian expression and editing at targeted sites in the human genome. Multiple RT enzymes and fusion architectures will be tested, in addition to adjacent targeting with secondary gRNAs (truncated to prevent nicking). Non-covalent RT recruitment will also be evaluated using the Sun-Tag systems and MS2 aptamer system⁵³. Indel formation assays will be used to evaluate targeting efficiency with standard gRNAs and RT-Cas9 fusions (as above). Then, for each genomic site, extended gRNAs and RT-Cas9 pairs will be assayed for single nucleotide editing. Editing outcomes will be evaluated with MiSeq.

[1216] Initial experiments in HEK cells were performed using Cas9-RT fusions. Editing by components expressed within cells requires a Cas9(H840A) nickase, a reverse transcriptase (expressed as a fusion or supplied in trans), and an engineered gRNA with a 3′ extension (see FIG. 14). Preliminary studies indicated that the length of the primer binding site within the gRNA extension was important for increasing the efficiency of editing in human cells (see FIG. 15).

### Optimize Prime Editing Parameters in HEK Cells

[1217] After identifying Cas9-RT architectures that can perform prime editing in cells, the components and design will be optimized to achieve high efficiency editing. The location and nucleotide identity of the encoded point mutation, and the total length of the newly synthesized DNA strand, will be varied to evaluate editing scope and potential limitations. Short insertion and deletion mutations will also be evaluated. Protein expression constructs will be codon optimized. If successful, this would establish efficient prime editing in mammalian cells.

[1218] Preliminary Result. Additional gRNAs were designed to bring the RT enzyme to a higher local concentration at the editing locus, in the event that intramolecular reverse transcription by the fused RT enzyme were not possible. These auxiliary guides are truncated at the 5′ end (14-15 nt spacer), which has previously been shown to prevent Cas9 cutting but retain binding (see FIG. 16). The HEK3 locus was chosen to explore this strategy.

### Potential Difficulties and Alternatives

[1219] 1) gRNA degradation in cells: if extended gRNA termini are truncated in cells, stabilizing secondary structures could be installed, or synthetic gRNAs with stabilizing modifications could be tested. (2) No observed editing in human cells: additional strategies will be explored, including secondary targeting of RT-Cas9 fusions to adjacent genomic sites⁵⁴. In addition, potential directed evolution strategies in E. coli or S. cerevisiae could be explored.

[1220] Significance

[1221] If prime editing could be established in experimental cell lines, this would have an immediate impact for basic biomedical research by enabling the rapid generation and characterization of a large number of point mutations in human genes. The generality of the method, and its orthogonal editing window with respect to base editors, would provide an approach to installing many currently inaccessible mutations. Moreover, if prime editing could be optimized for high efficiency and product purity, its potential applicability to correcting disease mutations in other human cell types would be significant.

### 3. Achieve Site-Specific Editing of Pathogenic Mutations in Cultured Human Cells.

[1222] Background and Rationale.

[1223] A large number of pathogenic mutations cannot be corrected by current base editors due to PAM restrictions, or a need for transversion or indel mutation correction. With prime editing, all transitions and transversions are theoretically possible, as may be small insertions and deletions. Moreover, in relation to the PAM, the prime editing window (anticipated −3 to +4) is distinct from that of base editors (−18 to −12) (FIG. 13). Mendelian conditions not currently correctable by base editors include: (1) the sickle cell disease Glu6Val founder mutation in hemoglobin beta (requires A●T to TA transversion); (2) the most common Wilson's disease variant His1069Gln in ATP7B (requires GC to TA transversion); and (3) the ΔPhe508 mutation in CFTR that causes cystic fibrosis (requires 3-nucleotide insertion). Each of these targets contains an appropriately positioned PAM for SpCas9 targeting and prime editing.

[1224] Preliminary Results.

T to A editing in HEK3 cells is not achievable by current base editing but is achievable by TRPT editing (see FIGS. 17A-17C).

[1225] FIG. 17A shows a graph displaying the % T to A conversion at the target nucleotide after transfection of components in human embryonic kidney (HEK) cells. This data presents results using an N-terminal fusion of wild type MLV reverse transcriptase to Cas9(H840A) nickase (32-amino acid linker). Editing efficiency was improved dramatically when the length of the primer binding site is extended from 7 nucleotides to 11 or 12 nucleotides. Additionally, the auxiliary guide A, which is positioned just upstream of the editing locus (see FIG. 16), significantly improves editing activity, particularly for shorter length primer binding sites. Editing efficiency was quantified by amplicon sequencing using the Illumina MiSeq platform. FIG. 17B also shows % T to A conversion at the target nucleotide after transfection of components in human embryonic kidney (HEK) cells, but this data presents results using a C-terminal fusion of the RT enzyme. Here, the auxiliary guide A does not have as much of an effect, and editing efficiency is overall higher. FIG. 17C shows data presenting results using an N-terminal fusion of wild type MLV reverse transcriptase to Cas9(H840A) nickase similar to that used in FIG. 17A; however the linker between the MLV RT and Cas9 is 60 amino acids long instead of 32 amino acids.

T to A editing at HEK3 site by TRPT editing results displays high purity.

[1226] FIG. 18 shows the output of sequencing analysis by high-throughput amplicon sequencing. The output displays the most abundant genotypes of edited cells. Of note, no major indel products are obtained, and the desired point mutation (T to A) is cleanly installed without bystander edits. The first sequence shows the reference genotype. The top two products are the starting genotype containing an endogenous polymorphism (G or A). The bottom two products represent the correctly edited genotypes.

MLV RT mutants improve editing.

[1227] Mutant reverse transcriptases, described in Baranauskas, et al (doi:10.1093/protein/gzs034), were tested as C-terminal fusions to the Cas9(H840A) nickase for target nucleotide editing in human embryonic kidney (HEK) cells. Cas9-RT editor plasmid was co-transfected with a plasmid encoding a 3′-prime editing guide RNA that templates reverse transcription. Editing efficiency at the target nucleotide (striped bars) is shown alongside indel rates (white bars) in FIG. 19. WT refers to the wild type MLV RT enzyme. The mutant enzymes (M1 through M4) contain the mutations listed to the right. Editing rates were quantified by high throughput sequencing of genomic DNA amplicons. Complementary strand nicking with a second gRNA improves editing.

[1228] This experiment evaluates editing efficiency of the target nucleotide when a single strand nick is introduced in the complementary DNA strand in proximity to the target nucleotide, with the hypothesis being that this would direct mismatch repair to preferentially remove the original nucleotide and convert the base pair to the desired edit. The Cas9(H840A)-RT editing construct was co-transfected with two guide RNA encoding plasmids, one of which templates the reverse transcription reaction, while the other targets the complementary DNA strand for nicking. Nicking at various distances from the target nucleotide was tested (triangles) (see FIG. 20). Editing efficiency at the target base pair (striped bars) is shown alongside the indel formation rate (white bars). The “none” example does not contain a complementary strand nicking guide RNA. Editing rates were quantified by high throughput sequencing of genomic DNA amplicons.

[1229] FIG. 21 shows processed high throughput sequencing data showing the desired T to A transversion mutation and general absence of other major genome editing byproducts.

[1230] Scope. The potential scope for the new editing technology is shown in FIG. 13 and is compared to deaminase-mediated base editor technologies. Previously developed base editors target a region ˜15±2 bp upstream of the PAM. By converting target C or A nucleotides to T or G, respectively, previously developed base editors enable all transition mutations (A:T to G:C conversions). However, previously developed base editors are unable to install transversion mutations (A to T, A to C, G to T, G to C, T to A, T to G, C to A, C to G). Moreover, if there are multiple target nucleotides in the editing window, additional undesired edits can result.

[1231] The new prime editing technology could theoretically install any nucleotide and base pair conversion, and potentially small insertion and deletion edits as well. With respect to the PAM, prime editing windows start at the site of DNA nicking (3 bases upstream of the PAM) and end at an as-of-yet undetermined position downstream of the PAM. Of note, this editing window is distinct from that of deaminase base editors. Because the TPRT systems performs editing using DNA polymerase enzymes, it potentially has all of their benefits including generality, precision, and fidelity.

### Correct Pathogenic Mutations in Patient-Derived Cell Lines.

[1232] Cell lines harboring the relevant mutations (sickle cell disease: CD34+ hematopoietic stem cells; Wilson's disease: cultured fibroblasts; cystic fibrosis: cultured bronchial epithelia) will be obtained from ATCC, the Coriell Biobank, or collaborating Harvard/Broad affiliate laboratories. Editing efficiency will be evaluated by high throughput sequencing, and the efficacy of the corrected genotype will be tested using phenotypic assays (hemoglobin HPLC, ATP7B immunostaining, and CFTR membrane potential assays).

### Characterize Off-Target Editing Activity.

[1233] Potential off-target editing will be screened with established methods such as GUIDE-seq⁵⁵ and CIRCLE-seq⁵⁶ using target gRNAs paired with wild type Cas9. If potential off-targets are identified, these loci will be probed in TPRT edited cells to identify true off-target editing events.

### Potential Difficulties and Alternatives.

[1234] (1) Low editing efficiency: prime editor (PE)s may require optimization for each target. In this case, gRNA libraries can be tested to identify the highest functioning variants for specific applications. RT-Cas fusion expression and nuclear localization can be optimized. Liposomal RNP delivery could be used to limit off-target editing.

### Upcoming Experiments.

[1235] Optimization of gRNA designs can be achieved by further exploration of the primer binding site length and extension of synthesis template. Testing scope and generality will include different nucleotide conversions, small insertions and deletions, as well as, different editing positions with respect to PAM, and multiple sites in the human genome. Optimization of RT component will include exploring mutations in MLV RT to enhance activity (Rnase H inactivation, increase primer-template binding affinity, adjustments to processivity), and new RT enzymes (group II intro RTs, other retroviral RTs).

[1236] Significance.

[1237] Myriad genetic disorders result from single nucleotide changes in individual genes. Developing the genome editing technology described here, and applying it in disease-relevant cell types, would establish a foundation for translation to the clinic. For some diseases, such as Sickle Cell Disease, a single point mutation represents the dominant genotype throughout the population. However, for many other genetic disorders, a large heterogeneity of different point mutations within a single gene is observed throughout the patient population, each of which gives rise to a similar disease phenotype. Therefore, as a general genome editing method that could in theory target a large number of such mutations, this technology could provide enormous potential benefit to many of these patients and their families. If proof of principle for these applications could be established in cells, it would establish the foundation to studies in animal models of disease.

[1238] Advantages

[1239] Precision: the desired edit is encoded directed in nucleic acid sequence. Generality: in theory, could be possible to make any base pair conversion, including transversion edits, as well as small insertions or deletions. There is a distinct editing window from that of base editors with respect to Cas9 protospacer adjacent motif (PAM) sequence. This method achieves many of the editing capabilities of homology-directed repair (HDR), but without the major limitations of HDR (inefficient in most cell types, and is usually accompanied by an excess of undesired byproducts such as indels). Also, it does not make double-stranded DNA breaks (DSB s, so few indels, translocations, large deletions, p53 activation, etc.

### Example 2—Error-Prone Prime Editing (Pe)

[1240] Prime editing (PE) systems described herein may also be used in conjunction with an error-prone reverse transcriptase enzyme to install mutations in a genome.

[1241] An embodiment is depicted in FIG. 22, which is a schematic of an exemplary process for conducting targeted mutagenesis with an error-prone reverse transcriptase on a target locus using a nucleic acid programmable DNA binding protein (napDNAbp) complexed with an extended guide RNA. This process may be referred to as an embodiment of prime editing for targeted mutagenesis. The extended guide RNA comprises an extension at the 3′ or 5′ end of the guide RNA, or at an intramolecular location in the guide RNA. In step (a), the napDNAbp/gRNA complex contacts the DNA molecule and the gRNA guides the napDNAbp to bind to the target locus to be mutagenized. In step (b), a nick in one of the strands of DNA of the target locus is introduced (e.g., by a nuclease or chemical agent), thereby creating an available 3′ end in one of the strands of the target locus. In certain embodiments, the nick is created in the strand of DNA that corresponds to the R-loop strand, i.e., the strand that is not hybridized to the guide RNA sequence. In step (c), the 3′ end DNA strand interacts with the extended portion of the guide RNA in order to prime reverse transcription. In certain embodiments, the 3′ ended DNA strand hybridizes to a specific RT priming sequence on the extended portion of the guide RNA. In step (d), an error-prone reverse transcriptase is introduced which synthesizes a mutagenized single strand of DNA from the 3′ end of the primed site towards the 3′ end of the guide RNA. Exemplary mutations are indicated with an asterisk “*”. This forms a single-strand DNA flap comprising the desired mutagenized region. In step (e), the napDNAbp and guide RNA are released. Steps (f) and (g) relate to the resolution of the single strand DNA flap (comprising the mutagenized region) such that the desired mutagenized region becomes incorporated into the target locus. This process can be driven towards the desired product formation by removing the corresponding 5′ endogenous DNA flap that forms once the 3′ single strand DNA flap invades and hybridizes to the complementary sequence on the other strand. The process can also be driven towards product formation with second strand nicking, as exemplified in FIG. 1F. Following endogenous DNA repair and/or replication processes, the mutagenized region becomes incorporated into both strands of DNA of the DNA locus.

### Example 3—Trinucleotide Repeat Contraction with Pe

[1242] The prime editing system or prime editing (PE) system described herein may be used to contract trinucleotide repeat mutations (or “triplet expansion diseases”) to treating conditions such as Huntington's disease and other trinucleotide repeat disorders. Without wishing to be bound by theory, triplet expansion is caused by slippage during DNA replication or during DNA repair synthesis. Because the tandem repeats have identical sequence to one another, base pairing between two DNA strands can take place at multiple points along the sequence. This may lead to the formation of “loop out” structures during DNA replication or DNA repair synthesis. This may lead to repeated copying of the repeated sequence, expanding the number of repeats. Additional mechanisms involving hybrid RNA:DNA intermediates have been proposed. Prime editing may be used to reduce or eliminate these triplet expansion regions by deletion one or more or the offending repeat codon triplets. In an embodiment of this use, FIG. 23, provides a schematic of a PEgRNA design for contracting or reducing trinucleotide repeat sequences with prime editing.

[1243] Thus, prime editing may be able to be used to correct any trinucleotide repeat disorder, including, Huntington's disease, Fragile X syndrome, and Friedreich's ataxia.

[1244] The most common trinucleotide repeat contains CAG triplets, though GAA triplets (Friedreich's ataxia) and CGG triplets (Fragile X syndrome) also occur. The CAG triplets code for glutamine (Q), thus, CAG repeats result in polyglutamine tracts in the coding regions of diseased proteins. This particular class of trinucleotide repeat disorders are also called “polyglutamine (PolyQ) diseases.” Other trinucleotide repeats can cause alterations in gene regulation and are referred to as “non-polyglutamine diseases.” Inheriting a predisposition to expansion, or acquiring an already expanded parental allele, increases the likelihood of acquiring the disease. Pathogenic expansions of trinucleotide repeats could be corrected using prime editing.

[1245] Prime editing may be implemented to contract triplet expansion regions by nicking a region upstream of the triplet repeat region with the prime editor comprising a PEgRNA appropriated targeted to the cut site. The prime editor then synthesizes a new DNA strand (ssDNA flap) based on the PEgRNA as a template (i.e., the edit template thereof) that codes for a healthy number of triplet repeats (which depends on the particular gene and disease). The newly synthesized ssDNA strand comprising the healthy triplet repeat sequence also is synthesized to include a short stretch of homology (i.e., the homology arm) that matches the sequence adjacent to the other end of the repeat. Invasion of the newly synthesized strand, and subsequent replacement of the endogenous DNA with the newly synthesized ssDNA flap, leads to a contracted repeat allele.

### Example 4—Peptide Tagging with Pe

[1246] The prime editing systems (i.e., PE systems) described herein may also be used to introduce various peptide tags into protein coding genes. Such tags can include HEXAhistidine tags, FLAG-tag, V5-tag, GCN4-tag, HA-tag, Myc-tag and others. This approach may be useful in applications such as protein fluorescent labeling, immunoprecipitation, immunoblotting, immunohistochemistry, protein recruitment, inducible protein degrons, and genome-wide screening. Embodiments are depicted in FIGS. 25 and 26.

[1247] FIG. 25 is a schematic showing gRNA design for peptide tagging genes at endogenous genomic loci and peptide tagging with TPRT genome editing (i.e., prime editing). The FlAsH and ReAsH tagging systems comprise two parts: (1) a fluorophore-biarsenical probe, and (2) a genetically encoded peptide containing a tetracysteine motif, exemplified by the sequence FLNCCPGCCMEP (SEQ ID NO: 1). When expressed within cells, proteins containing the tetracysteine motif can be fluorescently labeled with fluorophore-arsenic probes (see ref: J. Am. Chem. Soc., 2002, 124 (21), pp 6063-6076. DOI: 10.1021/ja017687n). The “sortagging” system employs bacterial sortase enzymes that covalently conjugate labeled peptide probes to proteins containing suitable peptide substrates (see ref: Nat. Chem. Biol. 2007 Nov. 3(11):707-8. DOI: 10.1038/nchembio.2007.31). The FLAG-tag (DYKDDDDK (SEQ ID NO: 2)), V5-tag (GKPIPNPLLGLDST (SEQ ID NO: 3)), GCN4-tag (EELLSKNYHLENEVARLKK (SEQ ID NO: 4)), HA-tag (YPYDVPDYA (SEQ ID NO: 5)), and Myc-tag (EQKLISEEDL (SEQ ID NO: 6)) are commonly employed as epitope tags for immunoassays. The pi-clamp encodes a peptide sequence (FCPF) (SEQ ID NO: 622) that can by labeled with a pentafluoro-aromatic substrates (ref: Nat. Chem. 2016 Feb. 8(2):120-8. doi: 10.1038/nchem.2413).

[1248] FIG. 26 shows precise installation of a His6-tag and a FLAG-tag into genomic DNA. A guide RNA targeting the HEK3 locus was designed with a reverse transcription template that encodes either an 18-nt His-tag insertion or a 24-nt FLAG-tag insertion. Editing efficiency in transfected HEK cells was assessed using amplicon sequencing. Note that the full 24-nt sequence of the FLAG-tag is outside of the viewing frame (sequencing confirmed full and precise insertion).

### Example 5—Prevention or Treatment of Prion Disease with Pe

[1249] This invention could help address the problem of prion disease in humans, livestock, and wildlife. No previously described editing strategy is efficient and clean enough to install protective mutations or to reliably knock down PRNP. Cas9 nuclease and HDR can be used but will generate mostly a mixture of PRNP indel variants some of which are thought to be pathogenic. Moreover, HDR does not work in most types of cells. Prime editing is reliable and efficient at installing both types of mutations without generating an excess of double-stranded DNA breaks or resulting indels.

[1250] This invention describes how to install a protective mutation in PRNP that prevents or halts the progression of prion disease. This site is conserved in mammals, so in addition to treating human disease it could also be used to generate cows and sheep that are immune to prion disease, or even help cure wild populations of animals that are suffering from prion disease. Prime editing has already been used to achieve ˜25% installation of a naturally occurring protective allele in human cells, and previous mouse experiments indicate that this level of installation is sufficient to cause immunity from most prion diseases. This method is the first and potentially only current way to install this allele with such high efficiency in most cell types. Another possible strategy for treatment is to use prime editing to reduce or eliminate the expression of PRNP by installing an early stop codon in the gene. Many researchers predict that doing so would treat the disease.

[1251] Three potential therapeutic strategies include prime editing to reduce expression of PrP. This goal may be accomplished by the introduction of mutations that cause a premature stop codon in PRNP, eliminate the start codon, mutate or delete essential amino acids codons, introduce or remove splice sites to generate an aberrant transcript, or alter regulatory elements that reduce transcript levels. Prime editing to eliminate disease mutations. Many variants of PRNP have been described (ncbi.nlm.nih.gov/pmc/articles/PMC6097508/#b154-ndt-14-2067) that lead to an increased likelihood of contracting disease. Each known variant could be reversed using prime editing, since prime editing can make all possible types of point mutations, local insertions, and local deletions. Prime editing to introduce one or more protective mutations into PRNP that disrupt prion formation and/or transmission. For example, G127V in the human PRNP gene has been demonstrated to protect against many forms of prion disease (ncbi.nlm.nih.gov/pmc/articles/PMC4486072/). This mutation was later described to interfere with prion formation by preventing formation of stable beta sheets and dimers (ncbi.nlm.nih.gov/pubmed/30181558, ncbi.nlm.nih.gov/pubmed/26906032). In addition to the introduction of single nucleotide polymorphisms, the insertion or deletion of sequences in PRNP that would interfere with prion formation could also be used to protect from or treat prion disease.

[1252] The third therapeutic strategy is particularly advantageous because the introduction of protective variants could confer a benefit even when a relatively small number of cells experience the edit. Furthermore, the introduction of protective variants, especially those naturally occurring in human populations such as G127V, would not be expected to have any detrimental consequences, while reducing expression of prion protein as in strategy 1 could have some detrimental phenotypes, as have been documented in PRNP knock-out mice (ncbi.nlm.nih.gov/pmc/articles/PMC4601510/, ncbi.nlm.nih.gov/pmc/articles/PMC2634447/).

[1253] It has previously been demonstrated that mice expressing a ratio of approximately 2:1 of the wild type human prion protein: the protective G127V variant of the human prion protein (approximately 33% expression of the protective variant) were entirely immune to most tested forms of prion disease and were also resistant to variant Creutzfeldt-Jakob disease (νCJD), the human disease transmitted from bovine spongiform encephalopathy (BSE, or mad cow disease)⁹¹. Mice that only expressed the protective G127V variant were entirely immune to all tested prion disease challenges, including νCJD.

[1254] It is demonstrated herein that the protective G127V mutation can be efficiently installed in human cells in tissue culture using prime editing (see FIG. 27).

[1255] Informed by these results, three settings are described in which PRNP editing could be used. One setting PRNP editing can be used is prime editing in human patients to prevent or treat prion disease. A second setting PRNP editing can be used is prime editing in livestock to prevent the occurrence and spread of prion disease. Both cow and sheep livestock have experienced sporadic occurrence of prion disease caused by the protein generated by the PRNP gene. In addition to the debilitating and deadly disease suffered by the animal, these cases are also economically devastating, in part due to the care that must be taken to prevent the spread of the extremely infectious disease. A single dairy cow in the state of Washington tested positive for BSE in December of 2003, which led to a projected loss of 2.8-4.2 billion dollars in beef sales the following year bookstore.ksre.ksu.edu/pubs/MF2678.pdf). The PRNP gene is highly conserved in mammals. Introducing a PRNP mutation such as G127V into the livestock germline could eliminate the occurrence of BSE or scrapie, the manifestation of prion disease in sheep. A third setting PRNP editing can be used is prime editing in wildlife could prevent the spread of wild prion disease. Currently, cervid populations including deer, elk, and moose in North America are suffering from chronic wasting disease (CWD), a manifestation of prion disease caused by PNRP in these species. The occurrence has been reported to be as high as 25% in some populations (cdc.gov/prions/cwd/occurrence.html). CWD has also been reported in Norway, Finland, and South Korea. It is not yet known whether the disease is transmissible from these species to humans (cdc.gov/prions/cwd/transmission.html) or livestock. The introduction of PRNP mutations such as G127V in the germline of these species could protect them from CWD and reduce the risk of transmission to other species including humans.

[1256] This method could be used to treat Creutzfeldt-Jakob Disease (CJD), kuru, Gerstmann-Sträussler-Scheinker disease, fatal familial insomnia (FFI), bovine spongiform encephalopathy (BSE; mad cow disease), scrapie (in sheep), and chronic wasting disease (CWD; in deer, elk, and moose).

[1257] The method would need to be combined with a delivery methodology for embryos or adult neurons, such as microinjection, lipid nanoparticles, or AAV vectors.

### Example 6—RNA Tagging and Manipulation Using Pe

[1258] A new method for the insertion of motifs into genetic sequences that tag or otherwise manipulate RNA within mammalian, eukaryotic, and bacterial cells is described herein. While it is estimated that only 1% of the human genome encodes proteins, virtually all of the genome is transcribed at some level. It is an open question how much of the resulting non-coding RNA (ncRNA) plays a functional role, let alone what the roles of most of these putative RNAs are. “Tagging” of these RNA molecules via the insertion of a novel RNA-encoding sequence with a useful property into genes of interest is a useful method for studying the biological functions of RNA molecules in cells. It can also be useful install tags onto protein-encoding mRNAs as a means to perturb and thus better understand how mRNA modifications can affect cellular function. For instance, a ubiquitous natural RNA tag—polyadenylation—is used by cells to affect transport of mRNA into the cytoplasm. Different types of polyadenylation signals result in different transport rates and different mRNA lifespans and—thus—differences in the levels to which the encoded protein is expressed.

[1259] A common approach for expressing tagged RNAs within cells is to exogenously introduce a synthetic construct using either (i) transient plasmid transfection that produces a short-term burst of gene expression, often at supraphysiologic levels; or (ii) permanent integration of the tagged RNA gene into the genome (at random sites) using lentiviral integration or transposons, which enables prolonged expression. Both of these approaches are limited by production of altered expression levels, and by the absence of natural mechanisms that regulate the expression or activity of the gene. An alternative strategy is to directly tag a gene of interest at its endogenous locus using homology-directed repair (HDR) of double-stranded DNA breaks induced by Cas9 or other targeted DNA nucleases. While this approach enables the generation of a wide range of endogenously tagged genes, HDR is markedly inefficient and so requires significant screening to identify the desired clonal population of cells that have been successfully tagged. Moreover, HDR is typically very inefficient or entirely inactive in a large number of cell types, most notably in post-mitotic cells. The low efficiency of HDR is further complicated by the generation of undesired indel products, would could be especially problematic in the case of RNA genes as they might lead to the production of an RNA whose activities interfere with the function of normal alleles. Finally, researchers often need to screen various tagging positions within an RNA molecule to achieve optimal performance. Combined, these drawbacks make HDR a less desirable method for installation of tags in RNA.

[1260] Prime editing is a new genome editing technology that enables targeted editing of genomic loci via the transfer of genetic information from RNA to DNA. Using prime editing, RNA genes could be tagged with a variety of components such as RNA aptamers, ribozymes, or other RNA motifs. Prime editing has the potential to be faster, cheaper, and effective in a greater variety of cell types by comparison to HDR strategies. As such, the described invention represents a novel, useful, and non-obvious tool for investigating the biology of RNA genes in health and disease. A new method for the insertion of RNA motifs into genetic sequences that tag or otherwise manipulate RNA using prime editors (PEs) is described herein. PEs are capable of site-specifically inserting, mutating, and/or deleting multiple nucleotides at a desired genomic locus that is targetable by a CRISPR/Cas system. PEs are composed of fusions between Cas9 nuclease domains and reverse transcriptase domains. They are guided to their genomic target by engineered PEgRNAs (prime editing guide RNAs), which contain a guide spacer portion for DNA targeting, as well as a template for reverse transcription that encodes the desired genome edit (see FIG. 28A). It is envisioned that PE can be used to insert motifs that are functional at the RNA level (hereafter RNA motifs) to tag or otherwise manipulate non-coding RNAs or mRNAs. These motifs could serve to increase gene expression, decrease gene expression, alter splicing, change post-transcriptional modification, affect the sub-cellular location of the RNA, enable isolation or determination of the intra- or extra-cellular location of the RNA (using, for instance, fluorescent RNA aptamers such as Spinach, Spinach2, Baby Spinach, or Broccoli), recruit endogenous or exogenous protein or RNA binders, introduce sgRNAs, or induce processing of the RNA, by either self-cleavage or RNAses (see FIG. 28B). Due to the flexibility of prime editing, it is not possible to provide a comprehensive list of RNA motifs that could be installed within the genome. A series of examples are shown here that broadly illustrate the predicted scope of PE-installed RNA motifs that could be used to tag RNA genes. It is currently not possible to efficiently and fairly cleanly make these changes in most types of cells (including the many that do not support HDR) using any other reported genome editing method besides PE.

[1261] Gene expression could be affected by encoding a 3′ untranslated region (UTR) that results in changes in nuclear transport or retention or mRNA lifespan. For instance, the polyA tail from polyomavirus simian virus 40 (SV40) has additional helper sequences that enable efficient transcription termination and can increase gene expression relative to other 3′ UTRs^{57,58}. Example sequence of SV40 polyA tail:

SV40 POLYA TAIL
(SEQ ID NO: 331)
AACTTGTTTATTGCAGCTTATAATGGTTACAAATAAAGCAATAGCATCAC
AAATTTCACAAATAAAGCATTTTTTTCACTGCATTCTAGTTGTGGTTTGT
CCAAACTCATCAATGTATCTTA

[1262] Post-translational modification signals, besides polyadenylation signals, could also be encoded by PE. These include signals incorporate N6-methyladenosine, N1-methyladenosine, 5-methylcytosine, and pseudouridine modifications⁵⁹. By using PE to include sequences bound by enzymes that write or remove these modifications within an RNA transcript, it would be possible to induce their writing or erasing. This could be used as a tool to study the effects of these markers, to induce cellular differentiation, affect stress responses, or, given the function of these markers are as yet underexplored, affect targeted cells in other fashions.

[1263] PE could encode mutations that affect subcellular localization. For instance, incorporation of tRNA-Lys within an mRNA can theoretically result in transport to the mitochondria⁶⁰, while various 3′ UTRs can result in nuclear retention or transport⁶¹.

### Examples

[1264] SV40 polyA signal results in transport.

[1265] U1 snRNA 3′ box results in retention.

SV40 POLYA TAIL
(SEQ ID NO: 331)
AACTTGTTTATTGCAGCTTATAATGGTTACAAATAAAGCAATAGCATCAC
AAATTTCACAAATAAAGCATTTTTTTCACTGCATTCTAGTTGTGGTTTGT
CCAAACTCATCAATGTATCTTA

U1 SNRNA 3′ BOX
(SEQ ID NO: 625)
TTCATTCAGCAAGTTCAGAGAAATCTGAACTTGCTGGATTTTTGGAGCAG
GGAGATGGAATAGGAGCTTGCTCCGTCCACTCCACGCATCGACCTGGTAT
TGCAGTACCTCCAGGAACGGTGCACCCACTTTCTGGAGTTTCAAAAGTAG
ACTGTACGCTAAGGGTCATATCTTTTTTTGTTT GGTTTGTGTCTTGGTT
GGCGTCTTAA

[1266] Determining the sub-cellular localization of endogenous RNA can be challenging and requires the addition of exogenous, fluorescently-tagged nucleotide probes, as in the case of FISH, or time-consuming and potentially inaccurate cell fractionation followed by RNA detection. Encoding a probe within the endogenous RNA would obviate many of these issues. One example would be to encode a fluorescent RNA aptamer, such as Spinach⁶² or Broccoli within an endogenous RNA, thereby visualizing the presence of that RNA via addition of a small molecule proto-fluorophore.

[1267] Broccoli aptamer:

BROCCOLI APTAMER
(SEQ ID NO: 357)
GAGACGGTCGGGTCCAGATATTCGTATCTGTCGAGTAGAGTGTGGGCTC

[1268] PE could insert or remove sequences that encode RNA that are recognized by RNA binding proteins, affecting RNA stability, expression, localization, or modification (for instance, see proteins listed⁶³).

[1269] PE could insert sequences that encode sgRNAs within the genome, as a viral or cancer defense mechanism. Similarly, it could be used to insert microRNAs (e.g., pre-microRNAs) to direct silencing of targeted genes.

[1270] PE could insert sequences resulting in processing of the RNA, either by itself, or by external factors, either as a therapy or tool for studying the function of various portions of the RNA. For instance, the HDV ribozyme⁶⁴, when included within an RNA sequence, results in processing of the RNA immediately 5′ of the ribozyme, while the hammerhead ribozyme cleaves prior to the third stem within the ribozyme⁶⁵. Other self-cleaving ribozymes include pistol⁶⁶, hatchet⁶⁶, hairpin⁶⁷, Neuropora Varkud satellite⁶⁸, glmS⁶⁹, twister⁷⁰, and twister sister⁶⁶. These sequences could include wild-type or engineered or evolved versions of ribozymes. The majority of these ribozymes could have different sequences depending on the region of RNA into which they were associated, depending on where the ribozyme cut site is located. Sequences that would direct the processing of the RNA by external factors, such as sequence specific RNAses⁷¹, RNAses that recognize specific structures⁷²—such as Dicer⁷³ and Drosha⁷⁴, could also be achieved.

[1271] HDV ribozyme:

HDV RIBOZYME
(SEQ ID NO: 365)
GGCCGGCATGGTCCCAGCCTCCTCGCTGGCGCCGGCTGGGCAACATGCTT
CGGCATGGCGAATGGGAC

### REFERENCES FOR EXAMPLE 6

[1272] The following references are incorporated herein by reference in their entireties.
[1273] 1. Schek N, Cooke C, Alwine J C. Molecular and Cellular Biology. 1992.
[1274] 2. Gil A, Proudfoot N J. Cell. 1987.
[1275] 3. Zhao, B. S., Roundtree, I. A., He, C. Nat Rev Mol Cell Biol. 2017.
[1276] 4. Rubio, M. A. T., Hopper, A. K. Wiley Interdiscip Rev RNA 2011.
[1277] 5. Shechner, D. M., Hacisuleyman E., Younger, S. T., Rinn, J. L. Nat Methods. 2015.
[1278] 6. Paige, J. S., Wu, K. Y., Jaffrey, S. R. Science 2011.
[1279] 7. Ray D., . . . Hughes T R. Nature 2013.
[1280] 8. Chadalavada, D. M., Cerrone-Szakal, A. L., Bevilacqua, P. C. RNA 2007.
[1281] 9. Forster A C, Symons R H. Cell. 1987.
[1282] 10. Weinberg Z, Kim P B, Chen T H, Li S, Harris K A, Lünse CE, Breaker R R. Nat. Chem. Biol. 2015.
[1283] 11. Feldstein P A, Buzayan J M, Bruening G. Gene 1989.
[1284] 12. Saville B J, Collins R A. Cell. 1990.
[1285] 13. Winkler W C, Nahvi A, Roth A, Collins J A, Breaker R R. Nature 2004.
[1286] 14. Roth A, Weinberg Z, Chen A G, Kim P G, Ames T D, Breaker R R. Nat Chem Biol. 2013.
[1287] 15. Choudhury R, Tsai Y S, Dominguez D, Wang Y, Wang Z. Nat Commun. 2012.
[1288] 16. MacRae I J, Doudna J A. Curr Opin Struct Biol. 2007.
[1289] 17. Bernstein E, Caudy A A, Hammond S M, Hannon G J Nature 2001.
[1290] 18. Filippov V, Solovyev V, Filippova M, Gill S S. Gene 2000.

### Example 7—Generation of Gene Libraries with Pe

[1291] A new method for the cellular generation of highly sophisticated libraries of protein- or RNA-coding genes with defined or variable insertions, deletions, or defined amino acid/nucleotide conversions, and their use in high-throughput screening and directed evolution is described herein. The references cited in the Example are based from the list of references included at the end of this Example.

[1292] The generation of variable genetic libraries has most commonly been accomplished through mutagenic PCR¹. This method relies on either using reaction conditions that reduce the fidelity of DNA polymerase, or using modified DNA polymerases with higher mutation rates. As such, biases in these polymerases are reflected in the library product (e.g. a preference for transition mutations versus transversions). An inherent limitation of this approach to library construction is a relative inability to affect the size of the gene being varied. Most DNA polymerases have extremely low rates of indel mutations (insertions or deletions), and most of these will result in frameshift mutations in protein-coding regions, rendering members of the library unlikely to pass any downstream selection. Additionally, biases in PCR and cloning can make it difficult to generate single libraries consisting of genes of different sizes. These limitations can severely limit the efficacy of directed evolution to enhance existing or engineer novel protein functions. In natural evolution, large changes in protein function or efficacy are typically associated with insertion and deletion mutations that are unlikely to occur during canonical library generation for mutagenesis. Furthermore, these mutations most commonly occur in regions of the protein in question that are predicted to form loops, as opposed to the hydrophobic core. Thus, most indels generated using a traditional unbiased approach are likely to either be deleterious or ineffective.

[1293] Libraries that could bias such mutations to the sites within the protein where they would be most likely to be beneficial, i.e. loop regions, would have a significant advantage over traditional libraries given that all libraries access only a fraction of the possible mutation space. Finally, although it is possible to generate genetic libraries with site-specific indel mutations through multistep PCR and clonal assembly using NNK primers or via DNA shuffling, these libraries cannot undergo additional rounds of ‘indelgenesis’ in continual evolution. Continuous evolution is a type of directed evolution with minimal user intervention. One such example is PACE³. Because continuous evolution occurs with minimal user intervention, any increase in library diversity during the evolution must occur using the native replication machinery. As such, although libraries of genes with inserted or removed codons as specific loci can be generated and screened in PACE, additional rounds of ‘indelgenesis’ are not possible.

[1294] It is envisioned that the programmability of prime editing (PE) can be leveraged to generate highly sophisticated, programmed genetic libraries for use in high-throughput screening and directed evolution (see FIG. 29A). PE can insert, change or remove defined numbers of nucleotides from specified genetic loci using information encoded in a prime editing guide RNA (PEgRNA) (see FIG. 29B). This enables the generation of targeted libraries with one or more amino acids inserted or removed from the loop regions wherein mutations are most likely to give rise to changes in function, without background introduction of nonfunctional frameshift mutations (see FIG. 29C). PE can be used to install specific sets of mutations without regard for biases inherent in either DNA polymerase or the sequence being mutated.

[1295] For instance, while converting a CCC codon to a stop codon would be an unlikely occurrence via canonical library generation because it would require three consecutive mutations, including two transversions, PE could be used to convert any given, targeted codon to a TGA stop codon in one step. They could also be used to install programmed diversity at given positions, for instance by incorporating codons encoding any hydrophobic amino acid at a given site, while not encoding any others. Furthermore, because of the programmability of PE, multiple PEgRNAs could be utilized to generate multiple different edits at multiple sites simultaneously, enabling the generation of highly programmed libraries (see FIG. 29D). Additionally, it is possible to use reverse transcriptases with lower fidelity to generate regions of mutagenesis within an otherwise invariable library (such as the HIV-I reverse transcriptase⁴ or Bordetella phage reverse transcriptase⁵).

[1296] The possibility of iterative rounds of PE on the same site is also envisioned, allowing—for instance—the repeated insertion of codons at a single site. Finally, it is envisioned that all of the above described approaches can be incorporated into continual evolution, enabling the generation of novel in situ evolving libraries (see FIG. 30). They could also be used to construct these libraries within other cell types where it would otherwise be difficult to assemble large libraries, for instance within mammalian cells. Generation of PE-encoding bacterial strains that have been optimized for directed evolution would be a useful additional tool for the identification of proteins and RNAs with improved or novel functionality. All of these uses of PE are non-obvious due to the novel nature of PEs. In conclusion, library generation via PE would be a highly useful tool in synthetic biology and directed evolution, as well as for high-throughput screening of protein and RNA combinatorial mutants.

### Competing Approaches

[1297] The chief method by which diverse libraries are currently generated is by mutagenic PCR¹, described above. Insertions or deletions can be introduced via degenerated NNK primers at defined sites during PCR, although introducing such mutations at multiple sites requires multiple rounds of iterative PCR and cloning before constructing a more diverse library via mutagenic PCR, rendering the method slow. An alternative, complementary method is DNA shuffling, where fragments of a library of genes generated via DNase treatment are introduced into a PCR reaction without primers, resulting in the annealing of different fragments to each other and the rapid generation of more diverse libraries than via mutagenic PCR alone⁶. Although this approach can theoretically generate indel mutations, it more often results in frameshift mutations that destroy gene function. Furthermore, DNA shuffling requires a high degree of homology between gene fragments. Both of these methods must be done in vitro, with the resulting library transformed into cells, while libraries generated by PE can be constructed in situ, enabling their use in continual evolution. While libraries can be constructed in situ through in vivo mutagenesis, these libraries rely on the host cellular machinery and exhibit biases against indels. Similarly, although traditional cloning methods can be used to generate site-specific mutational profiles, they cannot be used in situ and are generally assembled one at a time in vitro before being transformed into cells. The efficiency and broad functionality of PE in both prokaryotic and eukaryotic cell types further suggests that these libraries could be constructed directly in the cell type of interest, as opposed to being cloned into a model organism such as E. coli and then transferred into the cell or organism of interest. Another competing approach for targeted diversification is automated multiplex genome engineering, or MAGE, wherein multiple single-stranded DNA oligonucleotides can be incorporated within replication forks and result in programmable mutations. However, MAGE requires significant modification of the host strain and can lead to a 100-fold increase in off-target or background mutations⁸, whereas PE is more highly programmed and anticipated to result in fewer off-target effects. Additionally, MAGE has not been demonstrated in a wide variety of cell types, including mammalian cells. Prime editing is a novel and non-obvious complementary technique for library generation.

### Examples of PE in Directed Evolution to Construct Gene Libraries

[1298] In one example, PE can be used in a directed evolution experiment to introduce protein variants into gene libraries during a continual evolution experiment using PACE, permitting iterative accumulation of both point mutations and indels in a manner not possible via traditional approaches. It has already been shown that PE can site-specifically and programmably insert nucleotides into a genetic sequence in E. coli. In the outlined directed evolution, it is proposed to identify monobodies with improved binding to a specific epitope via a modified two-hybrid protein:protein binding PACE selection. Specific and highly variable loops within these monobodies contribute significantly to affinity and specificity. Improved monobody binding might be obtained rapidly in PACE by varying the length and composition of these loops in a targeted fashion. However, varying sequence length is not an established functionality of PACE. While library of varied loop sizes might be used as a starting point for PACE, no subsequent improvements to length would arise throughout the PACE selection, barring access to beneficial synergistic combinations of point mutations and indel mutations. Introducing PE to the PACE selection would enable the in situ generation and evolution of monobodies with varying loop lengths. To do so, it is envisioned the introduction of an additional PE plasmid to the host E. coli strain, encoding the PE enzyme and one or more PEgRNAs. Expression of PE enzyme and PEgRNAs would be under the control of a small molecule delivered to the PACE lagoon at a rate selected by the experimenter.

[1299] In various embodiments, the PEgRNA components would contain a spacer directing the PE to the site of interest on the selection phage and would be designed such that a multiple of three nucleotides could be inserted at the target site such that a new PEgRNA binding site would be introduced, enabling the iterative insertion of one or more codons at the targeted site.

[1300] In parallel, another host E. coli strain might include PEgRNAs that would template the removal of one or more codons, enabling loop size to shrink during the evolution. A PACE experiment might utilize a mixture of both strains or alternate the two to permit the slow and controlled addition or removal of loop sequences.

[1301] It is noted that this technique can also be applied to the evolution of antibodies. The binding principles governing antibodies are very similar to those governing monobodies: the length of antibody complement-determining region loops is critical to their binding function. Further, longer loop lengths have been found to be critical in the development of rare antibodies with broadly protective activity against HIV-1 and other viral infections⁹. Application of PE as described above to an antibody or antibody-derived molecule would permit the generation of antibodies with diverse loop length and varied loop sequence. In combination with PACE, such an approach would permit enhanced binding through loop geometries not accessible to standard PACE, and thus permit evolution of highly functional antibodies.

[1302] Experiments will show the ability to use PE to correct a deleterious mutation in bacteriophage M3 in phage-assisted non-continuous evolution (PANCE), a necessary first step for using PE in continuous evolution (see FIG. 69).

### REFERENCES FOR EXAMPLE 7

[1303] The following references are incorporated herein by reference in their entireties.
[1304] 1. Cadwell R C and Joyce G F. PCR Methods Appl. 1992.
[1305] 2. McInerney P, Adams P, and Hadi M Z. Mol Biol Int. 2014.
[1306] 3. Esvelt K M, Carlson J C, and Liu D R. Nature. 2011.
[1307] 4. Naorem S S, Hin J, Wang S, Lee W R, Heng X, Miller J F, Guo H. Proc Natl Acad Sci USA 2017.
[1308] 5. Martinez M A, Vartanian J P, Wain-Hobson S. Proc Natl Acad Sci USA 1994.
[1309] 6. Meyer A J, Ellefson J W, Ellington A D. Curr Protoc Mol Biol. 2014.
[1310] 7. Wang H H, Isaacs F J, Carr P A, Sun Z Z, Xu G, Forest C R, Church G M. Nature. 2009.
[1311] 8. Nyerges A et al. Proc Natl Acad Sci USA. 2016.
[1312] 9. Mascola J R, Haynes B F. Immunol Rev. 2013.

### Example 8—Immunoepitope Insertion by Pe

[1313] Precise genome targeting technologies using the CRISPR/Cas system have recently been explored in a wide range of applications, including the insertion of engineered DNA sequences into targeted genomic loci. Previously, homology-directed repair (HDR) has been used for this application, requiring an ssDNA donor template and repair initiation by means of a double-stranded DNA break (DSB). This strategy offers the broadest range of possible changes to be made in cells and is the only method available to insert large DNA sequences into mammalian cells. However, HDR is hampered by undesired cellular side effects stemming from its initiating DSB, such as high levels of indel formation, DNA translocations, large deletions, and P53 activation. In addition to these drawbacks, HDR is limited by low efficiency in many cell types (T cells are a notable exception to this observation). Recent efforts to overcome these drawbacks include fusing human Rad51 mutants to a Cas9 D10A nickase (RDN), resulting in a DSB-free HDR system that features improved HDR product:indel ratios and lower off target editing, but is still hampered by cell-type dependencies and only modest HDR editing efficiency.

[1314] Recently developed fusions of Cas9 to reverse transcriptases (“Prime editors”) coupled with PEgRNAs represent a novel genome editing technology that offers a number of advantages over existing genome editing methods, including the ability to install any single nucleotide substitution, and to insert or delete any short stretch of nucleotides (up to at least several dozen bases) in a site-specific manner. Notably, PE edits are achieved with generally low rates of unintended indels. As such, PE enables targeted insertion-based editing applications that have been previously impossible or impractical.

[1315] This particular invention describes a method for using prime editing as a means to insert known immunogenicity epitopes into endogenous or foreign genomic DNA, resulting in modification of the corresponding proteins for therapeutic or biotechnological applications (see FIGS. 31 and 32). Prior to the invention of prime editing, such insertions could be achieved only inefficiently and with high rates of indel formation from DSBs. prime editing solves the problem of high indel formation from insertion edits while generally offering higher efficiency than HDR. This lower rate of indel formation presents a major advantage of prime editing over HDR as a method for targeted DNA insertions, especially in the described application of inserting immunogenicity epitopes. The length of epitopes is in a range from few bases to hundreds of bases. Prime editor is the most efficient and cleanest technology to achieve such targeted insertions in mammalian cells.

[1316] The key concept of the invention is the use of prime editors to insert a nucleotide sequence containing previously described immunogenicity epitopes into endogenous or foreign genomic DNA for the downregulation and/or destruction of their protein products and/or expressing cell types. Nucleotide sequences for immunogenic epitope insertion would be targeted to genes in a manner to produce fusion proteins of the targeted gene's coded protein and the inserted immunogenic epitope's corresponding protein translation. Patient's immune systems will have been previously trained to recognize these epitopes as a result of standard prior immunization from routine vaccination against, for example, tetanus or diphtheria or measles. As a result of the immunogenic nature of the fused epitopes, patient's immune systems would be expected to recognize and disable the prime edited protein (not just the inserted epitope) and potentially the cells from which it was expressed.

[1317] Fusions to targeted genes would be engineered as needed to ensure the inserted epitope protein translation is exposed for immune system recognition. This could include targeted nucleotide insertions resulting in protein translations yielding C-terminal fusions of immunogenicity epitopes to targeted genes, N-terminal fusions of immunogenicity epitopes to targeted genes, or the insertion of nucleotides into genes so that immunogenicity epitopes are coded within surfaced-exposed regions of protein structure.

[1318] Protein linkers encoded as nucleotides inserted between the target gene sequence and the inserted immunogenicity epitope nucleotide sequence may need to be engineered as part of this invention to facilitate immune system recognition, cellular trafficking, protein function, or protein folding of the targeted gene. These inserted nucleotide-encoded protein linkers may include (but are not limited to) variable lengths and sequences of the XTEN linker or variable lengths and sequences of Glycine-Serine linkers. These engineered linkers have been previous used to successfully facilitate protein fusions.

[1319] Distinguishing features of this invention include the ability to use previously acquired immune responses to specific amino acid sequences as a means to induce an immune response against otherwise non-immunogenic proteins. Another distinguishing feature is the ability to insert the nucleotide sequences of these immunogenic epitopes in a targets manner that does not induce high levels of unwanted indels as a by-product editing and is efficient in its insertion. The invention discussed herein also has the ability to combine cell type-specific delivery methods (such as AAV serotypes) to insert epitopes in cell types that are of interest to trigger an immune response to.

[1320] Prime editing as a means of inserting immunogenic epitopes into pathogenic genes could be used to program the patient's immune system to fight a wide variety of diseases (not limited to cancer as with immuno-oncology strategies). An immediately relevant use of this technology would be as a cancer therapeutic as it could undermine a tumor's immune escape mechanism by causing an immune response to a relevant oncogene like HER2 or growth factors like EGFR. Such an approach could seem similar to T-cell engineering, but one novel advance of this approach is that it can be utilized in many cell types and for diseases beyond cancer, without needed to generate and introduce engineered T-cells into patients.

[1321] Using PE to insert an immunogenicity epitope which most people are already vaccinated against (tetanus, pertussis, diphtheria, measles, mumps, rubella, etc.) into a foreign or endogenous gene that drives a disease, so the patient's immune system learns to disable that protein.

[1322] Diseases that stand to have a potential therapeutic benefit from the aforementioned strategy include those caused by aggregation of toxic proteins, such as in fatal familial insomnia. Other diseases that could benefit include those caused by pathogenic overexpression of an otherwise nontoxic endogenous protein, and those caused by foreign pathogens.

[1323] Primary therapeutic indications include those mentioned above such as therapeutics for cancer, prion and other neurodegenerative diseases, infectious diseases, and preventative medicine. Secondary therapeutic indications may include preventative care for patients with late-onset genetic diseases. It is expected that current standard of care medicines may be used in conjunction with prime editing for some diseases, like particularly aggressive cancers, or in cases where medications help alleviate disease symptoms until the disease completely cured.

[1324] Below are examples of immunogenic epitopes that can by inserted by prime editing can be used to achieve:

| | | Epitope Amino | Example Nucleic |
|---|---|---|---|
| Vaccine | Disease | Acid Sequence | Acid Sequence (8) |
| 1 | Tetanus | QYIKANSKFIGITEL | CATGATATAAAAGCAAATTCTAAAT |
| | toxoid | (SEQ ID NO: 396) | TTATAGGTATAACTGAACTA |
| | | | (SEQ ID NO: 397) |
| 2 | Diphtheria | GADDVVDSSKSF | GGCGCCGACGACGTGGTGGACAGCA |
| | toxin mutant | VMENFSSYHGTK | GCAAGAGCTTCGTGATGGAGAACTT |
| | CRM197 | PGYVDSIQKGIQK | CAGCAGCTACCACGGCACCAAGCCC |
| | | PKSGTQGNYDDD | GGCTACGTGGACAGCATCCAGAAGG |
| | | WKEFYSTDNKYD | GCATCCAGAAGCCCAAGAGCGGCAC |
| | | AAGYSVDNENPL | CCAGGGCAACTACGACGACGACTGG |
| | | SGKAGGVVKVTY | AAGGAGTTCTACAGCACCGACAACA |
| | | PGLTKVLALKVD | AGTACGACGCCGCCGGCTACAGCGT |
| | | NAETIKKELGLSL | GGACAACGAGAACCCCCTGAGCGGC |
| | | TEPLMEQVGTEEF | AAGGCCGGCGGCGTGGTGAAGGTGA |
| | | IKRFGDGASRVVL | CCTACCCCGGCCTGACCAAGGTGCT |
| | | SLPFAEGSSSVEYI | GGCCCTGAAGGTGGACAACGCCGAG |
| | | NNWEQAKALSVE | ACCATCAAGAAGGAGCTGGGCCTGA |
| | | LEINFETRGKRGQ | GCCTGACCGAGCCCCTGATGGAGCA |
| | | DAMYEYMAQAC | GGTGGGCACCGAGGAGTTCATCAAG |
| | | AGNRVRRSVGSS | AGGTTCGGCGACGGCGCCAGCAGGG |
| | | LSCINLDWDVIRD | TGGTGCTGAGCCTGCCCTTCGCCGA |
| | | KTKTKIESLKEHG | GGGCAGCAGCAGCGTGGAGTACATC |
| | | PIKNKMSESPNKT | AACAACTGGGAGCAGGCCAAGGCCC |
| | | VSEEKAKQYLEEF | TGAGCGTGGAGCTGGAGATCAACTT |
| | | HQTALEHPELSEL | CGAGACCAGGGGCAAGAGGGGCCA |
| | | KTVTGTNPVFAG | GGACGCCATGTACGAGTACATGGCC |
| | | ANYAAWAVNVA | CAGGCCTGCGCCGGCAACAGGGTGA |
| | | QVIDSETADNLEK | GGAGGAGCGTGGGCAGCAGCCTGA |
| | | TTAALSILPGIGSV | GCTGCATCAACCTGGACTGGGACGT |
| | | MGIADGAVHHNT | GATCAGGGACAAGACCAAGACCAA |
| | | EEIVAQSIALSSL | GATCGAGAGCCTGAAGGAGCACGGC |
| | | MVAQAIPLVGEL | CCCATCAAGAACAAGATGAGCGAGA |
| | | VDIGFAAYNFVES | GCCCCAACAAGACCGTGAGCGAGGA |
| | | IINLFQVVHNSYN | GAAGGCCAAGCAGTACCTGGAGGA |
| | | RPAYSPGHKTQPF | GTTCCACCAGACCGCCCTGGAGCAC |
| | | LHDGYAVSWNTV | CCCGAGCTGAGCGAGCTGAAGACCG |
| | | EDSIIRTGFQGESG | TGACCGGCACCAACCCCGTGTTCGC |
| | | HDIKITAENTPLPI | CGGCGCCAACTACGCCGCCTGGGCC |
| | | AGVLLPTIPGKLD | GTGAACGTGGCCCAGGTGATCGACA |
| | | VNKSKTHISVNGR | GCGAGACCGCCGACAACCTGGAGAA |
| | | KIRMRCRAIDGD | GACCACCGCCGCCCTGAGCATCCTG |
| | | VTFCRPKSPVYVG | CCCGGCATCGGCAGCGTGATGGGCA |
| | | NGVHANLHVAFH | TCGCCGACGGCGCCGTGCACCACAA |
| | | RSSSEKIHSNEISS | CACCGAGGAGATCGTGGCCCAGAGC |
| | | DSIGVLGYQKTV | ATCGCCCTGAGCAGCCTGATGGTGG |
| | | DHTKVNSKLSLFF | CCCAGGCCATCCCCCTGGTGGGCGA |
| | | EIKS | GCTGGTGGACATCGGCTTCGCCGCC |
| | | (SEQ ID NO: 630) | TACAACTTCGTGGAGAGCATCATCA |
| | | | ACCTGTTCCAGGTGGTGCACAACAG |
| | | | CTACAACAGGCCCGCCTACAGCCCC |
| | | | GGCCACAAGACCCAGCCCTTCCTGC |
| | | | ACGACGGCTACGCCGTGAGCTGGAA |
| | | | CACCGTGGAGGACAGCATCATCAGG |
| | | | ACCGGCTTCCAGGGCGAGAGCGGCC |
| | | | ACGACATCAAGATCACCGCCGAGAA |
| | | | CACCCCCCTGCCCATCGCCGGCGTG |
| | | | CTGCTGCCCACCATCCCCGGCAAGC |
| | | | TGGACGTGAACAAGAGCAAGACCCA |
| | | | CATCAGCGTGAACGGCAGGAAGATC |
| | | | AGGATGAGGTGCAGGGCCATCGACG |
| | | | GCGACGTGACCTTCTGCAGGCCCAA |
| | | | GAGCCCCGTGTACGTGGGCAACGGC |
| | | | GTGCACGCCAACCTGCACGTGGCCT |
| | | | TCCACAGGAGCAGCAGCGAGAAGAT |
| | | | CCACAGCAACGAGATCAGCAGCGAC |
| | | | AGCATCGGCGTGCTGGGCTACCAGA |
| | | | AGACCGTGGACCACACCAAGGTGAA |
| | | | CAGCAAGCTGAGCCTGTTCTTCGAG |
| | | | ATCAAGAGC |
| | | | (SEQ ID NO: 399) |
| 3 | mumps | GTYRLIPNARANL | GGCACCTACAGGCTGATCCCCAACG |
| | | TA (SEQ ID NO: 400) | CCAGGGCCAACCTGACCGCC |
| | | | (SEQ ID NO: 401) |
| 4 | mumps | PSKFFTISDSATFA | Ccgagcaaattttttaccattagcg |
| | | PGPVSNA (SEQ ID | atagcgcgacctttgcgccgggccc |
| | | NO: 402) | ggtgagcaacgcg (SEQ ID NO: 403) |
| | | PSKLFIMLDNATF | Ccgagcaaactgtttattatgctg |
| | | APGPVVNA | gataacgcgacctttgcgccgggc |
| | | (SEQ ID NO: 404) | ccggtggtgaacgcg |
| | | | (SEQ ID NO: 405) |
| | | | Selected examples from |
| | | | Hemagglutinin-neuraminidase |
| | | | (HN) diversity among outbreak |
| | | | strains (table1) Divergence |
| | | | between vaccine strain JL5 |
| | | | and outbreak strains (tab1e2) |
| 5 | Rubella virus | TPPPYQVSCGGES | ACCCCCCCCCCCTACCAGGTGAGCT |
| | (RV) | DRASARVIDPAA | GCGGCGGCGAGAGCGACAGGGCCA |
| | | QS (SEQ ID NO: 406) | GCGCCAGGGTGATCGACCCCGCCGC |
| | | | CCAGAGC (SEQ ID NO: 407) |
| 6 | Hemagglutinin | PEYAYKIVKNKK | CCCGAGTACGCCTACAAGATCGTGA |
| | | MEDGFLQGMVD | AGAACAAGAAGATGGAGGACGGCT |
| | | GWYGHHSNEQGS | TCCTGCAGGGCATGGTGGACGGCTG |
| | | GLMENERTLDKA | GTACGGCCACCACAGCAACGAGCAG |
| | | NPNNDLCSWSDH | GGCAGCGGCCTGATGGAGAACGAG |
| | | EASSNNTNQEDLL | AGGACCCTGGACAAGGCCAACCCCA |
| | | QRESRRKKRIGTS | ACAACGACCTGTGCAGCTGGAGCGA |
| | | TLNQRGNCNTKC | CCACGAGGCCAGCAGCAACAACACC |
| | | QTEEARLKREEVS | AACCAGGAGGACCTGCTGCAGAGGG |
| | | LVKSDQCSNGSL | AGAGCAGGAGGAAGAAGAGGATCG |
| | | QCRANNSTEQVD | GCACCAGCACCCTGAACCAGAGGGG |
| | | (SEQ ID NO: 408) | CAACTGCAACACCAAGTGCCAGACC |
| | | | GAGGAGGCCAGGCTGAAGAGGGAG |
| | | | GAGGTGAGCCTGGTGAAGAGCGACC |
| | | | AGTGCAGCAACGGCAGCCTGCAGTG |
| | | | CAGGGCCAACAACAGCACCGAGCA |
| | | | GGTGGAC (SEQ ID NO: 409) |
| 7 | Neuraminidase | TKSTNSRSGGISG | ACCAAGAGCACCAACAGCAGGAGC |
| | | PDNEAPVGEAPSP | GGCGGCATCAGCGGCCCCGACAACG |
| | | YGDNPRPNDGNN | AGGCCCCCGTGGGCGAGGCCCCCAG |
| | | IRIGSKGYNGIITD | CCCCTACGGCGACAACCCCAGGCCC |
| | | TIEESCSCYPDAK | AACGACGGCAACAACATCAGGATCG |
| | | VVKSVELDSTIWT | GCAGCAAGGGCTACAACGGCATCAT |
| | | SGSSPNQKIITIGW | CACCGACACCATCGAGGAGAGCTGC |
| | | DPNGWTGTPMSP | AGCTGCTACCCCGACGCCAAGGTGG |
| | | NGAYGTDGPSNG | TGAAGAGCGTGGAGCTGGACAGCAC |
| | | QANQHQAESISA | CATCTGGACCAGCGGCAGCAGCCCC |
| | | GNSSLCPIRDNWH | AACCAGAAGATCATCACCATCGGCT |
| | | GSNRSWSWPDGAE | GGGACCCCAACGGCTGGACCGGCAC |
| | | (SEQ ID NO: 410) | CCCCATGAGCCCCAACGGCGCCTAC |
| | | | GGCACCGACGGCCCCAGCAACGGCC |
| | | | AGGCCAA.CCAGCACCAGGCCGAGA |
| | | | GCATCAGCGCCGGCAACAGCAGCCT |
| | | | GTGCCCCATCAGGGACAACTGGCAC |
| | | | GGCAGCAACAGGAGCTGGAGCTGGC |
| | | | CCGACGGCGCCGAG |
| | | | (SEQ ID NO: 411) |
| 8 | TAP | EKIVLLLAMMEKI | GAGAAGATCGTGCTGCTGCTGGCCA |
| | (transport | VLLLAKCQTPMG | TGATGGAGAAGATCGTGCTGCTGCT |
| | antigen | AIKAVDGVTNKC | GGCCAAGTGCCAGACCCCCATGGGC |
| | presentation) | PYLGSPSF | GCCATCAAGGCCGTGGACGGCGTGA |
| | on H5N1 | (SEQ ID NO: 412) | CCAACAAGTGCCCCTACCIGGGCAG |
| | virus | | CCCCAGCTTC |
| | hemagglutinin | | (SEQ ID NO: 413) |
| 9 | TAP | IRPCFWVELNPNQ | ATCAGGCCCTGCTTCTGGGTGGAGC |
| | (transport | KIITIRPCFWVELI | TGAACCCCAACCAGAAGATCATCAC |
| | antigen | CYPDAGEIT(SEQ | CATCAGGCCCTGCTTCTGGGTGGAG |
| | presentation) | ID NO: 414) | CTGATCTGCTACCCCGACGCCGGCG |
| | on h5n1 virus | AGATCACC | (SEQ ID NO: 415) |
| | neuraminidase | | |
| 10 | hemagglutinin | MEKIVLLLAEKIV | ATGGAGAAGATCGTGCTGCTGCTGG |
| | epitopes | LLLAMCPYLGSPS | CCGAGAAGATCGTGCTGCTGCTGGC |
| | toward class I | FKCQTPMGAIKA | CATGTGCCCCTACCTGGGCAGCCCC |
| | HLA | VDGVTNK | AGCTIVAAGTGCCAGACCCCCATGG |
| | | (SEQ ID NO: 416) | GCGCCATCAAGGCCGTGGACGGCGT |
| | | | GACCAACAAG(SEQ ID NO: 417) |
| 11 | neuraminidase | NPNQMITICYPDAG | AACCCCAACCAGAAGATCATCACCAT |
| | epitopes | EITIRPCFWVELRPC | CTGCTACCCCGACGCCGGCGAGATCA |
| | toward class I | FWVELI | CCATCAGGCCCTGCTTCTGGGTGGAG |
| | HLA | (SEQ ID NO: 418) | CTGAGGCCCTGCTTCTGGGTGGAGCT |
| | | | GATC (SEQ ID NO: 419) |
| 12 | hemagglutinin | MVSLVKSDQIGTST | ATGGTGAGCCTGGTGAAGAGCGACCA |
| | epitopes | LNQR | GATCGGCACCAGCACCCTGAACCAGA |
| | toward class II | (SEQ ID NO: 420) | GG (SEQ ID NO: 421) |
| | HLA | | |
| 13 | neuraminidase | YNGIITDTI | TACAACGGCATCATCACCGACACCATC |
| | epitopes | (SEQ ID NO: 422) | (SEQ ID NO: 423) |
| | toward class II | | |
| | HLA | | |
| 14 | hemagglutinin | MEKIVLLLAEKIVL | ATGGAGAAGATCGTGCTGCTGCTGGC |
| | epitope | LLAMMVSLVKSDQ | CGAGAAGATCGTGCTGCTGCTGGCCA |
| | H5N1-bound | CPYLGSPSFIGTSTL | TGATGGTGAGCCTGTGAAGAGCGAC |
| | class I and | NQRKCQTPMGAIK | CAGTGCCCCTACCTGGGCAGCCCCAG |
| | class II HLA | AVDGVTNK | CTTCATCGGCACCAGCACCCTGAACC |
| | | (SEQ ID NO: 424) | AGAGG (SEQ ID NO: 425) |
| 15 | neuraminidase | NPNQKIITIYNGIIT | AACCCCAACCAGAAGATCATCACCAT |
| | epitope | DTICYPDAGEITIRP | CTACAACGGCATCATCACCGACACCA |
| | H5N1-bound | CFWVELRPCFWVE | TCTGCTACCCCGACGCCGGCGAGATC |
| | class I and | LI | ACCATCAGGCCCTGCTTCTGGGTGGA |
| | class II HLA | (SEQ ID NO: 426) | GCTGAGGCCCTGCTTCTGGGTGGAGC |
| | | | TGATC (SEQ ID NO: 427) |

[1325] Below are additional examples of epitopes that may be integrated into a target gene for immunoepitope taggin:

### REFERENCES CITED IN EXAMPLE 8

[1326] The following references are incorporated by reference in their entireties.
[1327] 1. X. Wen, K. Wen, D. Cao, G. Li, R. W. Jones, J. Li, S. Szu, Y. Hoshino, L. Yuan, Inclusion of a universal tetanus toxoid CD4(+) T cell epitope P2 significantly enhanced the immunogenicity of recombinant rotavirus ΔVP8* subunit parenteral vaccines. Vaccine 32, 4420-4427 (2014).
[1328] 2. G. Ada, D. Isaacs, Carbohydrate-protein conjugate vaccines. Clin Microbiol Infect 9, 79-85 (2003).
[1329] 3. E. Malito, B. Bursulaya, C. Chen, P. L. Surdo, M. Picchianti, E. Balducci, M. Biancucci, A. Brock, F. Berti, M. J. Bottomley, M. Nissum, P. Costantino, R. Rappuoli, G. Spraggon, Structural basis for lack of toxicity of the diphtheria toxin mutant CRM197. Proceedings of the National Academy of Sciences 109, 5229 (2012).
[1330] 4. J. de Wit, M. E. Emmelot, M. C. M. Poelen, J. Lanfermeijer, W. G. H. Han, C. van Els, P. Kaaijk, The Human CD4(+) T Cell Response against Mumps Virus Targets a Broadly Recognized Nucleoprotein Epitope. J Virol 93, (2019).
[1331] 5. M. May, C. A. Rieder, R. J. Rowe, Emergent lineages of mumps virus suggest the need for a polyvalent vaccine. Int J Infect Dis 66, 1-4 (2018).
[1332] 6. M. Ramamurthy, P. Rajendiran, N. Saravanan, S. Sankar, S. Gopalan, B. Nandagopal, Identification of immunogenic B-cell epitope peptides of rubella virus E1 glycoprotein towards development of highly specific immunoassays and/or vaccine. Conference Abstract, (2019).
[1333] 7. U. S. F. Tambunan, F. R. P. Sipahutar, A. A. Parikesit, D. Kerami, Vaccine Design for H5N1 Based on B- and T-cell Epitope Predictions. Bioinform Biol Insights 10, 27-35 (2016).

### Example 9—In Vivo Delivery of Pe Agents

[1334] Precise genome targeting technologies using the CRISPR/Cas9 system have recently been explored in a wide range of applications, including gene therapy. A major limitation to the application of Cas9 and Cas9-based genome-editing agents in gene therapy is the size of Cas9 (>4 kb), impeding its efficient delivery via recombinant adeno-associated virus (rAAV). Recently-developed fusions of Cas9 to reverse transcriptases (“Prime editors”) represent a novel genome editing technology that possesses a number of advantages over existing genome editing methods, including the ability to install any single nucleotide substitution, and to insert or delete any arbitrarily-defined short (<˜P20) stretch of nucleotides in a site-specific manner. As such, this method enables editing of human pathogenic variants that have been intractable to correction previously. The delivery of prime editing reagents could enable correction of genetic sequences that cause human disease, or allow for the installation of disease-preventing gene variants.

[1335] This invention describes methods for delivering prime editors into cells in vitro and in vivo. Prime editors have been developed and characterized solely in cultured cells. No known method can deliver prime editors in vivo. The presently disclosed methods for delivering prime editors via rAAV or pre-assembled ribonucleoprotein (RNP) complexes will overcome several barriers to in vivo delivery. For example, the DNA encoding prime editors is larger than the rAAV packaging limit, and so requires special solutions. One such solution is formulating the editor fused to split intein pairs that are packaged into two separate rAAV particles that, when co-delivered to a cell, reconstitute the functional editor protein. Several other special considerations to account for the unique features of prime editing are described, including the optimization of second-site nicking targets and properly packaging prime editors into virus vectors, including lentiviruses and rAAV.

[1336] Distinguishing features include using ribonucleoprotein (RNP) delivery formulations, prime editors and nearby nicking targets can be pre-complexed with their specific sgRNA/PEgRNA. This will enhance the range of possible targetable sites and allow for greater optimization of editing efficiency relative to current data that has used DNA delivery. Using either RNP or mRNA delivery formulations, variant Cas proteins can be used that each complex with their own guide RNA variant. This will also allow for a greater diversity of potential nicking loci, so it is expected that optimization can be achieved for greater efficiency in any given application. Using RNP, it is expected to increase editing specificity base on previous RNP reports (Rees et al., 2017). This would reduce off-target prime editing. Potential architectures for splitting prime editors into two AAV vectors for delivery in vivo or ex vivo are described. Packaging prime editor into a dual AAV system requires optimization of design considerations including split sites, reconstitution methods (such as inteins), and guide expression architecture. Using a mixture of virus and RNP for delivery of prime editor, it is expected that editing will be controlled over time since RNP eventually degrades in vivo which will stop prime editing after RNP is no longer supplied.

[1337] Prime editor ribonucleoprotein (RNP), mRNA with prime editor guide RNA, or DNA can be packaged into lipid nanoparticles, rAAV, or lentivirus and injected, ingested, or inhaled to alter genomic DNA in vivo and ex vivo, including for the purposes of establishing animal models of human disease, testing therapeutic and scientific hypotheses in animal models of human disease, and treating disease in humans.

[1338] Prime editors could feasibly be used to correct a large fraction of all genetic diseases (˜89% of pathogenic human genetic variants in Clinvar), if suitable means of delivery into relevant cell types in vivo are developed. Blood diseases, retinal diseases, and liver diseases are the most likely first applications due to established delivery systems for other reagents. AAV capsids, other evolved or engineered viral vectors, and lipid nanoparticle formulations would need to be used in combination with this invention.

[1339] In certain embodiments, one or more of the prime editor domains (e.g., the napDNAbp domain or the RT domain) could be engineered with an intein sequence.

### Example 10—Use of Pe to Identify Off-Target Editing

[1340] There are currently no described methods to detect off-target editing with prime editors (prime editing itself has not been published yet). These methods would allow a researcher to identify potential sites of off-target editing using prime editors, which would be important considerations were this technique used to treat genetic disease in patients.

[1341] Methods described here could also be useful to identify off-targets of Cas nucleases. These off-targets have previously been identified using BLESS, Guide-Seq, CIRCLE-Seq, and Digenome-Seq. However, this method is advantageous in the sensitivity and simplicity of the process.

[1342] The key concept of this aspect is the idea of using prime editing to insert an adapter sequence or primer binding site, templated from a PEgRNA, to enable the rapid identification of genomic off-target modification sites of Cas nucleases or prime editors.

[1343] No method to identify in an unbiased manner prime editing off-target sites is known. This method is distinguished from other techniques that identify nuclease off-target sites because the adapter sequence is inserted in the same event as DNA binding and nicking, simplifying the downstream processing.

[1344] The present invention includes identification of off-target editing sites when editing inside a living cell, in tissue culture or animal models (see FIG. 33). To conduct this method, a PEgRNA is generated that has an identical protospacer to the final desired editor (and, if looking at prime editing off-targets, an identical primer-binding site sequence to the final desired editor), but includes the necessary sequences to install an adapter or primer binding site after reverse transcription by prime editing. In vivo editing is conducted using a prime editor or RT-fused nuclease, and isolate genomic DNA. The genomic DNA is fragmented by enzymatic or mechanical means and append a different adapter to sites of DNA fragmentation. PCR is used to amplify from one adapter to the adapter installed via PEgRNA. The resulting product is deep-sequenced to identify all modified sites.

[1345] The invention also includes identification of off-target editing sites using in vitro modification of genomic DNA (see FIG. 33). To conduct this method, RNP of purified prime editor protein and a PEgRNA is assembled that will install an adapter or primer binding sequence, but is otherwise the same as the PEgRNA of interest. This RNP is incubated with extracted genomic DNA before or after fragmentation of the DNA and attachment of different adapters to sites of DNA breaks. PCR is used to amplify from fragmented site to the adapter that was installed with PE. Deep sequence to identify sites of modification. This in vitro editing method should enhance the sensitivity of detection, because cellular DNA repair will never eliminate the reverse-transcribed DNA adapter added by the prime editor.

[1346] These methods could be used to identify off-target editing for any prime editor, or any genome editor that uses a guideRNA to recognize a target cut site (most Cas nucleases).

[1347] These methods could be applied to all genetic diseases for which genome editors are considered for use in treatment.

### Example 11—Use of Pe to Enable Chemical-Induced Dimerization of Target Proteins In Vivo

[1348] The prime editors described herein may also be used to place dimerization-induced biological processes, such as receptor signaling, under control of a convenient small-molecule drug by the genomic integration of genes encoding small-molecule binding proteins with prime editing is described herein. Using the prime editors described herein, the gene sequence encoding a small-molecule binding protein may be inserted within a gene encoding a target protein of interest in a living cell or patient. This edit alone should have no physiological effect. Upon administration of the small-molecule drug, which typically is a dimeric small molecule that can simultaneously bind to two drug-binding protein domains each of which is fused to a copy of the target protein, the small-molecule induces dimerization of the targeted protein. This target protein dimerization event then induces a biological signaling event, such as erythropoiesis or insulin signaling.

### Example 12—Prime Editing: Highly Versatile and Precise Search-and-Replace Genome Editing in Human Cells without Double-Stranded DNA Breaks

[1349] Current genome editing methods can disrupt, delete, or insert target genes with accompanying byproducts of double-stranded DNA breaks using programmable nucleases, and install the four transition point mutations at target loci using base editors. Small insertions, small deletions, and the eight transversion point mutations, however, collectively represent most pathogenic genetic variants but cannot be corrected efficiently and without an excess of byproducts in most cell types. Described herein is prime editing, a highly versatile and precise genome editing method that directly writes new genetic information into a specified DNA site using a catalytically impaired Cas9 fused to an engineered reverse transcriptase, programmed with an engineered prime editing guide RNA (PEgRNA) that both specifies the target site and encodes the desired edit. Greater than 175 distinct edits in human cells were performed to establish that prime editing can make targeted insertions, deletions, all 12 possible types of point mutations, and combinations thereof efficiently (typically 20-60%, up to 77% in unsorted cells) and with low byproducts (typically 1-10%), without requiring double-stranded breaks or donor DNA templates. Prime editing was applied in human cells to correct the primary genetic causes of sickle cell disease (requiring an A●T-to-TA transversion in HBB) and Tay-Sachs disease (requiring a 4-base deletion in HEXA), in both cases efficiently reverting the pathogenic genomic alleles to wild-type with minimal byproducts. Prime editing was also used to create human cell lines with these pathogenic HBB transversion and HEXA insertion mutations, to install the G127V mutation in PRNP that confers resistance to prion disease (requiring a G●C-to-T●A transversion), and to efficiently insert a His6 tag, a FLAG epitope tag, and an extended LoxP site into target loci in human cells. Prime editing offers efficiency and product purity advantages over HDR, and complementary strengths and weaknesses compared to base editing. Consistent with its search-and-replace mechanism, which requires three distinct base-pairing events, prime editing is much less prone to off-target DNA modification at known Cas9 off-target sites than Cas9. Prime editing substantially expands the scope and capabilities of genome editing, and in principle can correct ˜89% of known pathogenic human genetic variants.

[1350] The ability to make virtually any targeted change in the genome of any living cell or organism is a longstanding aspiration of the life sciences. Despite rapid advances in genome editing technologies, the majority of the >75,000 known human genetic variants associated with diseases¹¹¹ cannot be corrected or installed in most therapeutically relevant cells (FIG. 38A). Programmable nucleases such as CRISPR-Cas9 make double-stranded DNA breaks (DSBs) that can disrupt genes by inducing mixtures of insertions and deletions (indels) at target sites¹¹²⁻¹¹⁴. Nucleases can also be used to delete target genes^{115,116} or insert exogenous genes¹¹⁷⁻¹¹⁹, through homology-independent processes. Double-stranded DNA breaks, however, are also associated with undesired outcomes including complex mixtures of products, translocations¹²⁰, and p53 activation^{121,122}. Moreover, the vast majority of pathogenic alleles differ from their non-pathogenic counterparts by small insertions, deletions, or base substitutions that require much more precise editing technologies to correct (FIG. 38A). Homology-directed repair (HDR) stimulated by nuclease-induced DSBs¹²³ has been widely used to install a variety of precise DNA changes. HDR, however, relies on exogenous donor DNA repair templates, typically generates an excess of indel byproducts from end-joining repair of DSBs, and is inefficient in most therapeutically relevant cell types (T cells and some stem cells being important exceptions)^{124,125.} While enhancing the efficiency and precision of DSB-mediated genome editing remains the focus of promising efforts¹²⁶⁻¹³⁰, these challenges necessitate the exploration of alternative precision genome editing strategies.

[1351] Base editing can efficiently install or correct the four types of transition mutations (C to T, G to A, A to G, and T to C) without requiring DSBs in a wide variety of cell types and organisms, including mammals¹²⁸⁻¹³¹, but cannot currently achieve any of the eight transversion mutations (C to A, C to G, G to C, G to T, A to C, A to T, T to A, and T to G), such as the T●A-to-A●T mutation needed to directly correct the most common cause of sickle cell disease (HBB E6V)¹³². In addition, no DSB-free method has been reported to perform target deletions, such as the removal of the 4-base duplication that causes Tay-Sachs disease (HEXA 1278+TATC)¹³³, or targeted insertions, such as the precise 3-base insertion required to directly correct the most common cause of cystic fibrosis (CFTR AF508)¹³⁴. Targeted transversion point mutations, insertions, and deletions thus are difficult to install or correct efficiently and without excess byproducts in most cell types, even though they collectively account for most known pathogenic alleles (FIG. 38A).

[1352] Described herein is the development of prime editing, a new “search-and-replace” genome editing technology that mediates targeted insertions, deletions, and all 12 possible base-to-base conversions at targeted loci in human cells without requiring double-stranded DNA breaks, or donor DNA templates. Prime editors, initially exemplified by PE1, use a reverse transcriptase fused to a programmable nickase and a prime editing extended guide RNA (PEgRNA) to directly copy genetic information from the extension on the PEgRNA into the target genomic locus. A second-generation prime editor (PE2) uses an engineered reverse transcriptase to substantially increase editing efficiencies with minimal (typically <2%) indel formation, while a third-generation PE3 system adds a second guide RNA to nick the non-edited strand, thereby favoring replacement of the non-edited strand and further increasing editing efficiency, typically, to about 20-50% in human cells with about 1-10% indel formation. PE3 offers far fewer byproducts and higher or similar efficiency compared to optimized Cas9 nuclease-initiated HDR, and offers complementary strengths and weaknesses compared to current-generation base editors.

[1353] PE3 was applied at genomic loci in human HEK293T cells to achieve efficient conversion of HBB E6V to wild-type HBB, deletion of the inserted TATC to restore HEXA 1278+TATC to wild-type HEXA, installation in PRNP of the G127V mutation that confers resistance to prion disease¹³⁵ (requiring a G●C-to-T●A transversion), and targeted insertion of a His6 tag (18 bp), FLAG epitope tag (24 bp), and extended LoxP site for Cre-mediated recombination (44 bp). Prime editing was also successful in three other human cell lines, as well as in post-mitotic primary mouse cortical neurons, with varying efficiencies. Due to a high degree of flexibility in the distance between the initial nick and location of the edit, prime editing is not substantially constrained by the PAM requirement of Cas9 and in principle can target the vast majority of genomic loci. Off-target prime editing is much rarer than off-target Cas9 editing at known Cas9 off-target loci, likely due to the requirement of three distinct DNA base pairing events in order for productive prime editing to take place. By enabling precise targeted insertions, deletions, and all 12 possible classes of point mutations at a wide variety of genomic loci without the need for DSB s or donor DNA templates, prime editing has the potential to advance the study and correction of many gene variants.

### Results

[1354] Strategy for Transferring Information from an Extended Guide RNA into a Target DNA Locus

[1355] Cas9 targets DNA using a guide RNA containing a spacer sequence that hybridizes to the target DNA site^{112-114,136,137}. The aim was to engineer guide RNAs to both specify the DNA target as in natural CRISPR systems^{138,139}, and also to contain new genetic information that replaces the corresponding DNA nucleotides at the target locus. The direct transfer of genetic information from an extended guide RNA into a specified DNA site, followed by replacement of the original unedited DNA, in principle could provide a general means of installing targeted DNA sequence changes in living cells, without dependence on DSB s or donor DNA templates. To achieve this direct information transfer, the aim was to use genomic DNA, nicked at the target site to expose a 3′-hydroxyl group, to prime the reverse transcription of the genetic information from an extension on the engineered guide RNA (hereafter referred to as the prime editing guide RNA, or PEgRNA) directly into the target site (FIG. 38A).

[1356] These initial steps of nicking and reverse transcription, which resemble mechanisms used by some natural mobile genetic elements¹⁴⁰, result in a branched intermediate with two redundant single-stranded DNA flaps on one strand: a 5′ flap that contains the unedited DNA sequence, and a 3′ flap that contains the edited sequence copied from the PEgRNA (FIG. 38B). To achieve a successful edit, this branched intermediate must be resolved so that the edited 3′ flap replaces the unedited 5′ flap. While hybridization of the 5′ flap with the unedited strand is likely to be thermodynamically favored since the edited 3′ flap can make fewer base pairs with the unedited strand, 5′ flaps are the preferred substrate for structure-specific endonucleases such as FEN1¹⁴¹, which excises 5′ flaps generated during lagging-strand DNA synthesis and long-patch base excision repair. It was reasoned that preferential 5′ flap excision and 3′ flap ligation could drive the incorporation of the edited DNA strand, creating heteroduplex DNA containing one edited strand and one unedited strand (FIG. 38B).

[1357] Permanent installation of the edit could arise from subsequent DNA repair that resolves the mismatch between the two DNA strands in a manner that copies the information in the edited strand to the complementary DNA strand (FIG. 38C). Based on a similar strategy developed to maximize the efficiency of DNA base editing¹³¹⁻¹³³, it was envisioned that nicking the non-edited DNA strand, far enough from the site of the initial nick to minimize double-strand break formation, might bias DNA repair to preferentially replace the non-edited strand.

### Validation of Prime Editing Steps In Vitro and in Yeast Cells

[1358] Following cleavage of the PAM-containing DNA strand by the RuvC nuclease domain of Cas9, the PAM-distal fragment of this strand can dissociate from otherwise stable Cas9:sgRNA:DNA complexes¹⁴³. It was hypothesized that the 3′ end of this liberated strand might be sufficiently accessible to prime DNA polymerization. Guide RNA engineering efforts¹⁴⁴⁻¹⁴⁶ and crystal structures of Cas9:sgRNA:DNA complexes¹⁴⁷⁻¹⁴⁹ suggest that the 5′ and 3′ termini of the sgRNA can be extended without abolishing Cas9:sgRNA activity. PEgRNAs were designed by extending sgRNAs to include two critical components: a primer binding site (PBS) that allows the 3′ end of the nicked DNA strand to hybridize to the PEgRNA, and a reverse transcriptase (RT) template containing the desired edit that would be directly copied into the genomic DNA site as the 3′ end of the nicked DNA strand is extended across the RNA template by a polymerase (FIG. 38C).

[1359] These hypotheses were tested in vitro using purified S. pyogenes Cas9 protein. A series of PEgRNA candidates were constructed by extending sgRNAs on either terminus with a PBS sequence (5 to 6 nucleotides, nt) and an RT template (7 to 22 nt). It was confirmed that 5′-extended PEgRNAs direct Cas9 binding to target DNA, and that both 5′-extended PEgRNAs and 3′-extended PEgRNAs support Cas9-mediated target nicking in vitro and DNA cleavage activities in mammalian cells (FIGS. 44A-44C). These candidate PEgRNA designs were tested using pre-nicked 5′-Cy5-labeled dsDNA substrates, catalytically dead Cas9 (dCas9), and a commercial variant of Moloney murine leukemia virus (M-MLV) reverse transcriptase (FIG. 44D). When all components were present, efficient conversion of the fluorescently labeled DNA strand into longer DNA products with gel mobilities, consistent with reverse transcription along the RT template, (FIG. 38D, FIGS. 44D-44E) was observed. Products of desired length were formed with either 5′-extended or 3′-extended PEgRNAs (FIGS. 38D-38E). Omission of dCas9 led to nick translation products derived from reverse transcriptase-mediated DNA polymerization on the DNA template, with no PEgRNA information transfer (FIG. 38D). No DNA polymerization products were observed when the PEgRNA was replaced by a conventional sgRNA, confirming the necessity of the PBS and RT template components of the PEgRNA (FIG. 38D). These results demonstrate that Cas9-mediated DNA melting exposes a single-stranded R-loop that, if nicked, is competent to prime reverse transcription from either a 5′-extended or 3′-extended PEgRNA.

[1360] Next, non-nicked dsDNA substrates were tested with a Cas9 nickase (H840A mutant) that exclusively nicks the PAM-containing strand¹¹². In these reactions, 5′-extended PEgRNAs generated reverse transcription products inefficiently, possibly due to impaired Cas9 nickase activity (FIG. 44F). However, 3′-extended PEgRNAs enabled robust Cas9 nicking and efficient reverse transcription (FIG. 38E). The use of 3′-extended PEgRNAs generated only a single apparent product, despite the potential, in principle, for reverse transcription to terminate anywhere within the remainder of the PEgRNA. DNA sequencing of the products of reactions with Cas9 nickase, RT, and 3′-extended PEgRNAs revealed that the complete RT template sequence was reverse transcribed into the DNA substrate (FIG. 44G). These experiments established that 3′-extended PEgRNAs can template the reverse transcription of new DNA strands while retaining the ability to direct Cas9 nickase activity.

[1361] To evaluate the eukaryotic cell DNA repair outcomes of 3′ flaps produced by PEgRNA-programmed reverse transcription in vitro, DNA nicking and reverse transcription using PEgRNAs, Cas9 nickase, and RT in vitro on reporter plasmid substrates were performed, and the reaction products were then transformed into yeast (S. cerevisiae) cells (FIG. 45A). Encouragingly, when plasmids were edited in vitro with 3′-extended PEgRNAs encoding a T●A-to-A●T transversion that corrects the premature stop codon, 37% of yeast transformants expressed both GFP and mCherry proteins (FIG. 38F, FIG. 45C). Consistent with the results in FIG. 38E and FIG. 44F, editing reactions carried out in vitro with 5′-extended PEgRNAs yielded fewer GFP and mCherry double-positive colonies (9%) than those with 3′-extended PEgRNAs (FIG. 38F and FIG. 45D). Productive editing was also observed using 3′-extended PEgRNAs that insert a single nucleotide (15% double-positive transformants) or delete a single nucleotide (29% double-positive transformants) to correct frameshift mutations (FIG. 38F and FIGS. 45E-45F). DNA sequencing of edited plasmids recovered from double-positive yeast colonies confirmed that the encoded transversion edit occurred at the desired sequence position (FIG. 45G). These results demonstrate that DNA repair in eukaryotic cells can resolve 3′ DNA flaps arising from prime editing to incorporate precise DNA edits including transversions, insertions, and deletions.

### Design of Prime Editor 1 (PE1)

[1362] Encouraged by the results in vitro and in yeast, a prime editing system with a minimum number of components capable of editing genomic DNA in mammalian cells was sought for development. It was hypothesized that 3′-extended PEgRNAs (hereafter referred to simply as PEgRNAs, FIG. 39A) and direct fusions of Cas9 H840A to reverse transcriptase via a flexible linker may constitute a functional two-component prime editing system. HEK293T (immortalized human embryonic kidney) cells were transfected with one plasmid encoding a fusion of wild-type M-MLV reverse transcriptase to either terminus of Cas9 H840A nickase as well as a second plasmid encoding a PEgRNA. Initial attempts led to no detectable T●A-to-A●T conversion at the HEK3 target locus.

[1363] Extension of the PBS in the PEgRNA to 8-15 bases (FIG. 39A), however, led to detectable T●A-to-A●T editing at the HEK3 target site (FIG. 39B), with higher efficiencies for prime editor constructs in which the RT was fused to the C-terminus of Cas9 nickase (3.7% maximal T●A-to-A●T conversion with PBS lengths ranging from 8-15 nt) compared to N-terminal RT—Cas9 nickase fusions (1.3% maximal T●A-to-A●T conversion) (FIG. 39B; all mammalian cell data herein reports values for the entire treated cell population, without selection or sorting, unless otherwise specified). These results suggest that wild-type M-MLV RT fused to Cas9 requires longer PBS sequences for genome editing in human cells compared to what is required in vitro using the commercial variant of M-MLV RT supplied in trans. This first-generation wild-type M-MLV reverse transcriptase fused to the C-terminus of Cas9 H840A nickase was designated as PE1.

[1364] The ability of PE1 to precisely introduce transversion point mutations at four additional genomic target sites specified by the PEgRNA (FIG. 39C) was tested. Similar to editing at the HEK3 locus, efficiency at these genomic sites was dependent on PBS length, with maximal editing efficiencies ranging from 0.7-5.5% (FIG. 39C). Indels from PE1 were low, averaging 0.2±0.1% for the five sites under conditions that maximized each site's editing efficiency (FIG. 46A). PE1 was also able to install targeted insertions and deletions, exemplified by a single-nucleotide deletion (4.0% efficiency), a single-nucleotide insertion (9.7%), and a three-nucleotide insertion (17%) at the HEK3 locus (FIG. 39C). These results establish the ability of PE1 to directly install targeted transversions, insertions, and deletions without requiring double-stranded DNA breaks or DNA templates.

Design of prime editor 2 (PE2)

[1365] While PE1 can install a variety of edits at several loci in HEK293T cells, editing efficiencies were generally low (typically ≤5%) (FIG. 39C). It was hypothesized that engineering the reverse transcriptase in PE1 might improve the efficiency of DNA synthesis within the unique conformational constraints of the prime editing complex, resulting in higher genome editing yields. M-MLV RT mutations have been previously reported that increase enzyme thermostability^{150,151}, processivity¹⁵⁰, and DNA:RNA heteroduplex substrate affinity¹⁵², and that inactivate RNaseH activity¹⁵³. 19 PE1 variants were constructed containing a variety of reverse transcriptase mutations to evaluate their prime editing efficiency in human cells.

[1366] First, a series of M-MLV RT variants that previously emerged from laboratory evolution for their ability to support reverse transcription at elevated temperatures¹⁵⁰ were investigated. Successive introduction of three of these amino acid substitutions (D200N, L603W, and T330P) into M-MLV RT, hereafter referred to as M3, led to a 6.8-fold average increase in transversion and insertion editing efficiency across five genomic loci in HEK293T cells compared to that of PE1 (FIGS. 47A-47S).

[1367] Next, in combination with M3, additional reverse transcriptase mutations that were previously shown to enhance binding to template:PBS complex, enzyme processivity, and thermostability¹⁵² were tested. Among the 14 additional mutants analyzed, a variant with T306K and W313F substitutions, in addition to the M3 mutations, improved editing efficiency an additional 1.3-fold to 3.0-fold compared to M3 for six transversion or insertion edits across five genomic sites in human cells (FIGS. 47A-47S). This pentamutant of M-MLV reverse transcriptase incorporated into the PE1 architecture (Cas9 H840A-M-MLV RT (D200N L603W T330P T306K W313F)) is hereafter referred to as PE2.

[1368] PE2 installs single-nucleotide transversion, insertion, and deletion mutations with substantially higher efficiency than PE1 (FIG. 39C), and is compatible with shorter PBS PEgRNA sequences (FIG. 39C), consistent with an enhanced ability to productively engage transient genomic DNA:PBS complexes. On average, PE2 led to a 1.6- to 5.1-fold improvement in prime editing point mutation efficiency over PE1 (FIG. 39C), and in some cases dramatically improved editing yields up to 46-fold (FIG. 47F and FIG. 47I). PE2 also effected targeted insertions and deletions more efficiently than PE1, achieving the targeted insertion of the 24-bp FLAG epitope tag at the HEK3 locus with 4.5% efficiency, a 15-fold improvement over the efficiency of installing this insertion with PE1 (FIG. 47D), and mediated a 1-bp deletion in HEK3 with 8.6% efficiency, 2.1-fold higher than that of PE1 (FIG. 39C). These results establish PE2 as a more efficient prime editor than PE1.

### Optimization of PEgRNA Features

[1369] The relationship between PEgRNA architecture and prime editing efficiency was systematically probed at five genomic loci in HEK293T cells with PE2 (FIG. 39C). In general, priming sites with lower GC content required longer PBS sequences (EMX1 and RNF2, containing 40% and 30% GC content, respectively, in the first 10 nt upstream of the nick), whereas those with greater GC content supported prime editing with shorter PBS sequences (HEK4 and FANCF, containing 80% and 60% GC content, respectively, in the first 10 nt upstream of the nick) (FIG. 39C), consistent with the energetic requirements for hybridization of the nicked DNA strand to the PEgRNA PBS. No PBS length or GC content level was strictly predictive of prime editing efficiency, and other factors such as secondary structure in the DNA primer or PEgRNA extension may also influence editing activity. It is recommended to start with a PBS length of ˜13 nt for a typical target sequence, and exploring different PBS lengths if the sequence deviates from ˜40-60% GC content. When necessary, optimal PBS sequences should be determined empirically.

[1370] Next, the performance determinants of the RT template portion of the PEgRNA were studied. PEgRNAs with RT templates ranging from 10-20 nt in length were systemically evaluated at five genomic target sites using PE2 (FIG. 39D) and with longer RT templates as long as 31 nt at three genomic sites (FIGS. 48A-48C). As with PBS length, RT template length also could be varied to maximize prime editing efficiency, although in general many RT template lengths ≥10 nt long support more efficient prime editing (FIG. 39D). Since some target sites preferred longer RT templates (>15 nt) to achieve higher editing efficiencies (FANCF, EMX1), while other loci preferred short RT templates (HEK3, HEK4) (FIG. 39D), it is recommend both short and long RT templates be tested when optimizing a PEgRNA, starting with ˜10-16 nt.

[1371] Importantly, RT templates that place a C as the nucleotide adjacent to the terminal hairpin of the sgRNA scaffold generally resulted in lower editing efficiency compared to other PEgRNAs with RT templates of similar length (FIGS. 48A-48C). Based on the structure of sgRNAs bound to Cas9^{148,149} it was speculated that the presence of a C as the first nucleotide of the 3′ extension of a canonical sgRNA can disrupt the sgRNA scaffold fold by pairing with G81, a nucleotide that natively forms a pi stack with Tyr 1356 in Cas9 and a non-canonical base pair with sgRNA A68. Since many RT template lengths support prime editing, it is recommended to choose PEgRNAs in which the first base of the 3′ extension (the last reverse-transcribed base of the RT template) is not C.

### Design of Prime Editor 3 Systems (PE3 and PE3b)

[1372] While PE2 can transfer genetic information from the PEgRNA to the target locus more efficiently than PE1, the manner in which the cell resolves the resulting heteroduplex DNA created by one edited strand and one unedited strand determines if the edit is durable. A previous development of base editing faced a similar challenge since the initial product of cytosine or adenine deamination is heteroduplex DNA containing one edited and one non-edited strand. To increase the efficiency of base editing, a Cas9 D10A nickase was used to introduce a nick into the non-edited strand and to direct DNA repair to that strand, using the edited strand as a template^{129,130,142}. To exploit this principle to enhance prime editing efficiencies, a similar strategy of nicking the non-edited strand using the Cas9 H840A nickase already present in PE2 and a simple sgRNA to induce preferential replacement of the non-edited strand by the cell (FIG. 40A) was tested. Since the edited DNA strand was also nicked to initiate prime editing, a variety of sgRNA-programmed nick locations were tested on the non-edited strand to minimize the production of double-stranded DNA breaks that lead to indels.

[1373] This PE3 strategy was first tested at five genomic sites in HEK293T cells by screening sgRNAs that induce nicks located 14 to 116 bases from the site of the PEgRNA-induced nick, either 5′ or 3′ of the PAM. In four of the five sites tested, nicking the non-edited strand increased the amount of indel-free prime editing products compared to the PE2 system by 1.5- to 4.2-fold, to as high as 55% (FIG. 40B). While the optimal nicking position varied depending on the genomic site, nicks positioned 3′ of the PAM (positive distances in FIG. 40B) approximately 40-90 bp from the PEgRNA-induced nick generally produced favorable increases in prime editing efficiency (averaging 41%) without excess indel formation (6.8% average indels for the sgRNA resulting in the highest editing efficiency for each of the five sites tested) (FIG. 40B). As expected, at some sites, placement of the non-edited strand nick within 40 bp of the PEgRNA-induced nick led to large increases in indel formation up to 22% (FIG. 40B), presumably due to the formation of a double-strand break from nicking both strands close together. At other sites, however, nicking as close as 14 bp away from the PEgRNA-induced nick produced only 5% indels (FIG. 40B), suggesting that locus-dependent factors control conversion of proximal dual nicks into double-strand DNA breaks. At one tested site (HEK4), complementary strand nicks either provided no benefit or led to indel levels that surpassed editing efficiency (up to 26%), even when placed at distances >70 bp from the PEgRNA-induced nick, consistent with an unusual propensity of the edited strand at that site to be nicked by the cell, or to be ligated inefficiently. It is recommend to start with non-edited strand nicks approximately 50 bp from the PEgRNA-mediated nick, and to test alternative nick locations if indel frequencies exceed acceptable levels.

[1374] This model for how complementary strand nicking improved prime editing efficiency (FIG. 40A) predicted that nicking the non-edited strand only after edited strand flap resolution could minimize the presence of concurrent nicks, decreasing the frequency of double-strand breaks that go on to form indels. To achieve temporal control over non-edited strand nicking, sgRNAs with spacer sequences that match the edited strand, but not the original allele, were designed. Using this strategy, referred to hereafter as PE3b, mismatches between the spacer and the unedited allele should disfavor nicking by the sgRNA until after the editing event on the PAM strand takes place. This PE3b approach was tested with five different edits at three genomic sites in HEK293T cells and compared outcomes to those achieved with PE2 and PE3 systems. In all cases, PE3b was associated with substantially lower levels of indels compared to PE3 (3.5- to 30-fold, averaging 12-fold lower indels, or 0.85%), without any evident decrease in overall editing efficiency compared to PE3 (FIG. 40C). Therefore, when the edit lay within a second protospacer, the PE3b system could decrease indels while still improving editing efficiency compared to PE2, often to levels similar to those of PE3 (FIG. 40C).

[1375] Together, these findings established that PE3 systems (Cas9 nickase-optimized reverse transcriptase+PEgRNA+sgRNA) improved editing efficiencies ˜3-fold compared with PE2 (FIGS. 40B-40C). PE3 was accompanied by wider ranges of indels than PE2, as expected given the additional nicking activity of PE3. The use of PE3 is recommended when prioritizing prime editing efficiency. When minimization of indels is critical, PE2 offers ˜10-fold lower indel frequencies. When it is possible to use a sgRNA that recognizes the installed edit to nick the non-edited strand, the PE3b system can achieve PE3-like editing levels while greatly reducing indel formation.

[1376] To demonstrate the targeting scope and versatility of prime editing with PE3, the installation of all possible single nucleotide substitutions across the +1 to +8 positions (counting the first base 3′ of the PEgRNA-induced nick as position +1) of the HEK3 target site using PE3 and PEgRNAs with 10-nucleotide RT templates (FIG. 41A) was explored. Collectively, these 24 distinct edits cover all four transition mutations and all eight transversion mutations, and proceed with editing efficiencies (containing no indels) averaging 33±7.9% (ranging between 14% and 48%), with an average of 7.5±1.8% indels.

[1377] Importantly, long-distance RT templates could also give rise to efficient prime editing with PE3. For example, using PE3 with a 34-nt RT template, point mutations were installed at positions +12, +14, +17, +20, +23, +24, +26, +30, and +33 (12 to 33 bases from the PEgRNA-induced nick) in the HEK3 locus with an average of 36±8.7% efficiency and 8.6±2.0% indels (FIG. 41B). Although edits beyond the +10 position at other loci were not attempted, other RT templates ≥30 nt at three alternative sites also support efficient editing (FIGS. 48A-C). The viability of long RT templates enabled efficient prime editing for dozens of nucleotides from the initial nick site. Since an NGG PAM on either DNA strand occurs on average every ˜8 bp, far less than maximum distances between the edit and the PAM that support efficient prime editing, prime editing is not substantially constrained by the availability of a nearby PAM sequence, in contrast with other precision genome editing methods^{125,142,154}. Given the presumed relationship between RNA secondary structure and prime editing efficiency, when designing PEgRNAs for long-range edits it is prudent to test RT templates of various lengths and, if necessary, sequence compositions (e.g., synonymous codons) to optimize editing efficiency.

[1378] To further test the scope and limitations of the PE3 system for introducing transition and transversion point mutations, 72 additional edits covering all 12 possible types of point mutations across six additional genomic target sites (FIG. 41C-41H) were tested. Overall, indel-free editing efficiency averaged 25±14%, while indel formation averaged 8.3±7.5%. Since the PEgRNA RT template included the PAM sequence, prime editing could induce changes to the PAM sequence. In these cases, higher editing efficiency (averaging 39±9.7%) and lower indel generation (averaging 5.0±2.9%) were observed (FIGS. 41A-41K, point mutations at positions +5 or +6). This increase in efficiency and decrease in indel formation for PAM edits may arise from the inability of the Cas9 nickase to re-bind and nick the edited strand prior to the repair of the complementary strand. Since prime editing supports combination edits with no apparent loss of editing efficiency, editing the PAM, in addition to other desired changes, when possible, is recommended.

[1379] Next, 14 targeted small insertions and 14 targeted small deletions at seven genomic sites using PE3 (FIG. 41I) were performed. Targeted 1-bp insertions proceeded with an average efficiency of 32±9.8%, while 3-bp insertions were installed with an average efficiency of 39±16%. Targeted 1-bp and 3-bp deletions were also efficient, proceeding with an average yield of 29±14% and 32±11%, respectively. Indel generation (beyond the targeted insertion or deletion) averaged 6.8±5.4%. Since insertions and deletions introduced between positions +1 and +6 alter the position or the structure of the PAM, it was speculated that insertion and deletion edits in this range are typically more efficient due to the inability of Cas9 nickase to re-bind and nick the edited DNA strand prior to repair of the complementary strand, similar to point mutations that edit the PAM.

[1380] PE3 was also tested for its ability to mediate larger precise deletions of 5 bp to 80 bp at the HEK3 site (FIG. 41J). Very high editing efficiencies (52 to 78%) were observed for 5-, 10-, and 15-bp deletions when using a 13-nt PBS and an RT template that contained 29, 24, or 19 bp of homology to the target locus, respectively. Using a 26-nt RT template supported a larger deletion of 25 bp with 72±4.2% efficiency, while a 20-nt RT template enabled an 80-bp deletion with an efficiency of 52±3.8%. These targeted deletions were accompanied by indel frequencies averaging 11±4.8% (FIG. 41J).

[1381] Finally, the ability of PE3 to mediate 12 combinations of multiple edits at the same target locus consisting of insertions and deletions, insertions and point mutations, deletions and point mutations, or two point mutations across three genomic sites was tested. These combination edits were very efficient, averaging 55% of the target edit with 6.4% indels (FIG. 41K), and demonstrating the ability of prime editing to make combinations of precision insertions, deletions, and point mutations at individual target sites with high efficiency and low indel frequencies.

[1382] Together, the examples in FIGS. 41A-41K represent 156 distinct transition, transversion, insertion, deletion, and combination edits across seven human genomic loci. These findings establish the versatility, precision, and targeting flexibility of prime editing.

Prime Editing Compared with Base Editing

[1383] Current-generation cytidine base editors (CBEs) and adenine base editors (ABEs) can install CG-to-T●A transition mutations and A●T-to-GC transition mutations with high efficiency and low indels^{129,130,142}. The application of base editing can be limited by the presence of multiple cytidine or adenine bases within the base editing activity window (typically ˜5-bp wide), which gives rise to unwanted bystander edits^{129,130,142,155}, or by the absence of a PAM positioned approximately 15±2 nt from the target nucleotide^{142,156}. It was anticipated that prime editing could be particularly useful for precise installation of transitions mutations without bystander edits, or when the lack of suitably positioned PAMs precludes favorable positioning the target nucleotide within the CBE or ABE activity window.

[1384] Prime editing and cytosine base editing was compared by editing three genomic loci that contain multiple target cytidines in the canonical base editing window (protospacer positions 4-8, counting the PAM as positions 21-23) using optimized CBEs¹⁵⁷ without nickase activity (BE2max) or with nickase activity (BE4max), or using the analogous PE2 and PE3 prime editing systems. Among the nine total target cytosines within the base editing windows of the three sites, BE4max yielded 2.2-fold higher average total CG-to-T●A conversion than PE3 for bases in the center of the base editing window (protospacer positions 5-7, FIG. 42A). Likewise, non-nicking BE2max outperformed PE2 by 1.4-fold on average at these well-positioned bases (FIG. 42A). However, PE3 outperformed BE4max by 2.7-fold, and PE2 outperformed BE2max by 2.0-fold, for cytosines beyond the center of the base editing window (average editing of 40±17% for PE3 vs. 15±18% for BE4max, and 22±11% for PE2 vs. 11±13% for BE2max). Overall, indel frequencies for PE2 were very low (averaging 0.86±0.47%), and for PE3 were similar to or modestly higher than that of BE4max (BE4max range: 2.5% to 14%; PE3 range: 2.5% to 21%) (FIG. 42B).

[1385] When comparing the efficiency of base editing to prime editing for installation of precise CG-to-T●A edits (without any bystander editing), the efficiency of prime editing greatly exceeded that of base editing at the above sites, which like most genomic DNA sites, contain multiple cytosines within the ˜5-bp base editing window (FIG. 42C). At these sites, such as EMX1, which contains cytosines at protospacer positions C5, C6, and C7, BE4max generated few products containing only the single target base pair conversion with no bystander edits. In contrast, prime editing at this site could be used to selectively install a CG-to-T●A edit at any position or combination of positions (C5, C6, C7, C5+C6, C6+C7, C5+C7, or C5+C6+C7) (FIG. 42C). All precise one-base or two-base edits (that is, edits that do not modify any other nearby bases) were much more efficient with PE3 or PE2 than with BE4max or BE2, respectively, while the three-base CG-to-T●A edit was more efficient with BE4max (FIG. 42C), reflecting the propensity of base editors to edit all target bases within the activity window. Taken together, these results demonstrate that cytosine base editors can result in higher levels of editing at optimally positioned target bases than PE2 or PE3, but prime editing can outperform base editing at non-optimally positioned target bases, and can edit with much higher precision with multiple editable bases.

[1386] A●T-to-GC editing was compared at two genomic loci by an optimized non-nicking ABE (ABEmax¹⁵² with a dCas9 instead of a Cas9 nickase, hereafter referred to as ABEdmax) versus PE2, and by the optimized nicking adenine base editor ABEmax versus PE3. At a site that contains two target adenines in the base editing window (HEK3), ABEs were more efficient than PE2 or PE3 for conversion of A5, but PE3 was more efficient for conversion of A8, which lies at the edge of the ABEmax editing window (FIG. 42D). When comparing the efficiency of precision edits in which only a single adenine is converted, PE3 outperformed ABEmax at both A5 and A8 (FIG. 42E). Overall, ABEs produced far fewer indels at HEK3 than prime editors (0.19±0.02% for ABEdmax vs. 1.5±0.46% for PE2, and 0.53±0.16% for ABEmax vs. 11±2.3% for PE3, FIG. 42F). At FANCF, in which only a single A is present within the base editing window, ABE2 and ABEmax outperformed their prime editing counterparts in total target base pair conversion by 1.8- to 2.9-fold, with virtually all edited products from both base editing and prime editing containing only the precise edit (FIGS. 42D-42E). As with the HEK3 site, ABEs produced far fewer indels at the FANCF site (FIG. 42F).

[1387] Collectively, these results indicate that base editing and prime editing offer complementary strengths and weaknesses for making targeted transition mutations. For cases in which a single target nucleotide is present within the base editing window, or when bystander edits are acceptable, current base editors are typically more efficient and result in fewer indels than prime editors. When multiple cytosines or adenines are present and bystander edits are undesirable, or when target bases are poorly positioned for base editing relative to available PAMs, prime editors offer substantial advantages.

### Off-Target Prime Editing

[1388] To result in productive editing, prime editing requires target locus:PEgRNA spacer complementary for the Cas9 domain to bind, target locus:PEgRNA PBS complementarity for PEgRNA-primed reverse transcription to initiate, and target locus:reverse transcriptase product complementarity for flap resolution. It was hypothesized that these three distinct DNA hybridization requirements may minimize off-target prime editing compared to that of other genome editing methods. To test this possibility, HEK293T cells were treated with PE3 or PE2 and 16 total PEgRNAs designed to target four on-target genomic loci, with Cas9 and the four corresponding sgRNAs targeting the same protospacers, or with Cas9 and the same 16 PEgRNAs. These four target loci were chosen because each has at least four well-characterized off-target sites for which Cas9 and the corresponding on-target sgRNA in HEK293T cells is known to cause substantial off-target DNA modification^{118,159}. Following treatment, the four on-target loci and the top four known Cas9 off-target sites for each on-target spacer, were sequenced, for a total of 16 off-target sites (Table 1).

[1389] Consistent with previous studies¹¹⁸, Cas9 and the four target sgRNAs modified all 16 of the previously reported off-target loci (FIG. 42G). Cas9 off-target modification efficiency among the four off-target sites for the HEK3 target locus averaged 16%. Cas9 and the sgRNA targeting HEK4 resulted in an average of 60% modification of the four tested known off-target sites. Likewise, off-target sites for EMX1 and FANCF were modified by Cas9:sgRNA at an average frequency of 48% and 4.3%, respectively (FIG. 42G). It was noted that PEgRNAs with Cas9 nuclease modified on-target sites at similar (1- to 1.5-fold lower) efficiency on average compared to sgRNAs, while PEgRNAs with Cas9 nuclease modified off-target sites at ˜4-fold lower average efficiency than sgRNAs.

[1390] Strikingly, PE3 or PE2 with the same 16 tested PEgRNAs containing these four target spacers resulted in much lower off-target editing (FIG. 42H). Of the 16 sites known to undergo off-target editing by Cas9+sgRNA, PE3+PEgRNAs or PE2+PEgRNAs resulted in detectable off-target prime editing at only 3 of 16 off-target sites, with only 1 of 16 showing off-target editing efficiency ≥1% (FIG. 42H). Average off-target prime editing for the PEgRNAs targeting HEK3, HEK4, EMX1, and FANCF at these 16 known Cas9 off-target sites was <0.1%, <2.2±5.2%, <0.1%, and <0.13±0.11%, respectively (FIG. 42H). Notably, at the HEK4 off-target 3 site that Cas9+PEgRNA1 edits with 97% efficiency, PE2+PEgRNA1 results in only 0.7% off-target editing despite sharing the same spacer sequence, demonstrating how the two additional DNA hybridization events required for prime editing compared to Cas9 editing can greatly reduce off-target editing. Taken together, these results suggest that PE3 and PEgRNAs induce much lower off-target DNA editing in human cells than Cas9 and sgRNAs that target the same protospacers.

[1391] Reverse transcription of 3′-extended PEgRNAs in principle can proceed into the guide RNA scaffold. If the resulting 3′ flap, despite a lack of complementary at its 3′ end with the unedited DNA strand, is incorporated into the target locus, the outcome is insertion of PEgRNA scaffold nucleotides that contributes to indel frequency. We analyzed sequencing data from 66 PE3-mediated editing experiments at four loci in HEK293T cells and observed PEgRNA scaffold insertion at a low frequency, averaging 1.7±1.5% total insertion of any number of PEgRNA scaffold nucleotides (FIGS. 56A-56D). It is speculated that inaccessibility of the guide RNA scaffold to the reverse transcriptase due to Cas9 domain binding, as well as cellular excision during flap resolution of the mismatched 3′ end of the 3′ flap that results from PEgRNA scaffold reverse transcription, minimizes products that incorporate PEgRNA scaffold nucleotides. While such events are rare, future efforts to engineer PEgRNAs or prime editor proteins that minimize PEgRNA scaffold incorporation may further decrease indel frequencies.

[1392] Deaminases in some base editors can act in a Cas9-independent manner, resulting in low-level but widespread off-target DNA editing among first-generation CBEs (but not ABEs)¹⁶⁰⁻¹⁶² and off-target RNA editing among first-generation CBEs and ABEs¹⁶³⁻¹⁶⁵, although newer CBE and ABE variants with engineered deaminases greatly reduce Cas9-independent off-target DNA and RNA editing¹⁶³⁻¹⁶⁵. Prime editors lack base-modification enzymes such as deaminases, and therefore have no inherent ability to modify DNA or RNA bases in a Cas9-independent manner.

[1393] While the reverse transcriptase domain in prime editors in principle could process properly primed RNA or DNA templates in cells, it was noted that retrotransposons such as those in the LINE-1 family^{166,} endogenous retroviruses^{167,168,} and human telomerase all provided active endogenous human reverse transcriptases. Their natural presence in human cells suggests that reverse transcriptase activity itself is not substantially toxic. Indeed, no PE3-dependent differences were observed in HEK293T cell viability compared to that of controls expressing dCas9, Cas9 H840A nickase, or PE2 with R110S+K103L (PE2-dRT) mutations that inactivate the reverse transcriptase¹⁶⁹ (FIGS. 49A-49B).

[1394] The above data and analyses notwithstanding, additional studies are needed to assess off-target prime editing in an unbiased, genome-wide manner, as well as to characterize the extent to which the reverse transcriptase variants in prime editors, or prime editing intermediates, may affect cells.

### Prime Editing Pathogenic Transversion, Insertion, and Deletion Mutations in Human Cells

[1395] The ability of PE3 to directly install or correct in human cells transversion, small insertion, and small deletion mutations that cause genetic diseases, was tested. Sickle cell disease is most commonly caused by an A●T-to-T●A transversion mutation in HBB, resulting in the mutation of Glu6→Val in beta-globin. Treatment of hematopoietic stem cells ex vivo with Cas9 nuclease and a donor DNA template for HDR, followed by enrichment of edited cells, transplantation, and engraftment is a promising potential strategy for the treatment of sickle-cell disease¹⁷⁰. However, this approach still generates many indel-containing byproducts in addition to the correctly edited HBB allele¹⁷⁰⁻¹⁷¹. While base editors generally produce far fewer indels, they cannot currently make the T●A-to-A●T transversion mutation needed to directly restore the normal sequence of HBB.

[1396] PE3 was used to install the HBB E6V mutation in HEK293T cells with 44% efficiency and 4.8% indels (FIG. 43A. From the mixture of PE3-treated cells, we isolated six HEK293T cell lines that are homozygous (triploid) for the HBB E6V allele (FIGS. 53A-53E), demonstrating the ability of prime editing to generate human cell lines with pathogenic mutations. To correct the HBB E6V allele to wild-type HBB, we treated homozygous HBB E6V HEK293T cells with PE3 and a PEgRNA programmed to directly revert the HBB E6V mutation to wild-type HBB. In total, 14 PEgRNA designs were tested. After three days, DNA sequencing revealed that all 14 PEgRNAs when combined with PE3 gave efficient correction of HBB E6V to wild-type HBB (≥26% wild-type HBB without indels), and indel levels averaging 2.8±0.70% (FIG. 50A). The best PEgRNA resulted in 52% correction of HBB E6V to wild-type with 2.4% indels (FIG. 43A). Introduction of a silent mutation that modifies the PAM recognized by the PEgRNA modestly improved editing efficiency and product purity, to 58% correction with 1.4% indels (FIG. 43A). These results establish that prime editing can install and correct a pathogenic transversion point mutation in a human cell line with high efficiency and minimal byproducts.

[1397] Tay-Sachs disease is most often caused by a 4-bp insertion into the HEXA gene (HEXA 1278+TATC)¹³⁶. PE3 was used to install this 4-bp insertion into HEK293T cells with 31% efficiency and 0.8% indels (FIG. 43B), and isolated two HEK293T cell lines that are homozygous for the HEXA 1278+TATC allele (FIGS. 53A-53E). These cells were used to test 43 PEgRNAs and three nicking sgRNAs with PE3 or PE3b systems for correction of the pathogenic insertion in HEXA (FIG. 50B), either by perfect reversion to the wild-type allele or by a shifted 4-bp deletion that disrupts the PAM and installs a silent mutation. Nineteen of the 43 PEgRNAs tested resulted in ≥20% editing. Perfect correction to wild-type HEXA with PE3 or PE3b and the best PEgRNA proceeded with similar average efficiencies (30% for PE3 vs. 33% for PE3b), but the PE3b system was accompanied by 5.3-fold fewer indel products (1.7% for PE3 vs. 0.32% for PE3b) (FIG. 43B and FIG. 50B). These findings demonstrate the ability of prime editing to make precise small insertions and deletions that install or correct a pathogenic allele in mammalian cells efficiently and with a minimum of byproducts.

[1398] Finally, the installation of a protective SNP into PRNP, the gene encoding the human prion protein (PrP), was tested. PrP misfolding causes progressive and fatal neurodegenerative prion disease that can arise spontaneously, through inherited dominant mutations in the PRNP gene, or through exposure to misfolded PrP¹⁷². A naturally occurring PRNP G127V mutant allele confers resistance to prion disease in humans¹³⁸ and mice¹⁷³. PE3 was used to install G127V into the human PRNP allele in HEK293T cells, which requires a G●C-to-T●A transversion. Four PEgRNAs and three nicking sgRNAs were evaluated with the PE3 system. After three days of exposure to the most effective PE3 and PEgRNA, DNA sequencing revealed 53±11% efficiency of installing the G127V mutation and indel levels of 1.7±0.7% (FIG. 43C). Taken together, these results establish the ability of prime editing in human cells to install or correct transversion, insertion, or deletion mutations that cause or confer resistance to disease efficiently, and with a minimum of byproducts.

### Prime Editing in Various Human Cell Lines and Primary Mouse Neurons

[1399] Next, prime editing was tested for its ability to edit endogenous sites in three additional human cell lines. In K562 (leukemic bone marrow) cells, PE3 was used to perform transversion edits in the HEK3, EMX1, and FANCF sites, as well as the 18-bp insertion of a 6xHis tag in HEK3. An average editing efficiency of 15-30% was observed for each of these four PE3-mediated edits, with indels averaging 0.85-2.2% (FIG. 43A). In U2OS (osteosarcoma) cells, transversion mutations in HEK3 and FANCF were installed, as well as a 3-bp insertion and 6xHis tag insertion into HEK3, with 7.9-22% editing efficiency that exceeded indel formation 10- to 76 fold(FIG. 43A). Finally, in HeLa (cervical cancer) cells, a 3-bp insertion into HEK3 was performed, with 12% average efficiency and 1.3% indels (FIG. 43A). Collectively, these data indicate that multiple cell lines beyond HEK293T cells support prime editing, although editing efficiencies vary by cell type and are generally less efficient than in HEK293T cells. Editing:indel ratios remained high in all tested human cell lines.

[1400] To determine if prime editing is possible in post-mitotic, terminally differentiated primary cells, primary cortical neurons harvested from E18.5 mice were transduced with a dual split-PE3 lentiviral delivery system in which split-intein splicing²⁰³ reconstitutes PE2 protein from N-terminal and C-terminal halves, each delivered from a separate virus. To restrict editing to post-mitotic neurons, the human synapsin promoter, which is highly specific for mature neurons²⁰⁴, was used to drive expression of both PE2 protein components.

[1401] GFP was fused through a self-cleaving P2A peptide²⁰⁵ to the N-terminal half of PE2. Nuclei from neurons were isolated two weeks following dual viral transduction and were sequenced directly, or sorted for GFP expression before sequencing. A 7.1±1.2% average prime editing to install a transversion at the DNMT1 locus with 0.58±0.14% average indels in sorted nuclei (FIG. 43D was observed. Cas9 nuclease in the same split-intein dual lentivirus system resulted in 31±5.5% indels among sorted cortical neuron nuclei (FIG. 43D. These data indicate that post-mitotic, terminally differentiated primary cells can support prime editing, and thus establish that prime editing does not require cell replication.

Prime Editing Compared with Cas9-Initiated HDR

[1402] The performance of PE3 was compared with that of optimized Cas9-initiated HDR^{128,125} in mitotic cell lines that support HDR¹²⁸. HEK293T, HeLa, K562 and U2OS cells were treated with Cas9 nuclease, a sgRNA, and an ssDNA donor oligonucleotide template designed to install a variety of transversion and insertion edits (FIGS. 43E-43G, and FIGS. 51A-51G). Cas9-initiated HDR in all cases successfully installed the desired edit, but with far higher levels of byproducts (predominantly indels), as expected from treatments that cause double-stranded breaks. Using PE3 in HEK293T cells, HBB E6V installation and correction proceeded with 42% and 58% average editing efficiency with 2.6% and 1.4% average indels, respectively (FIG. 43E and FIG. 43G). In contrast, the same edits with Cas9 nuclease and an HDR template resulted in 5.2% and 6.7% average editing efficiency, with 79% and 51% average indel frequency (FIG. 43E and FIG. 43G). Similarly, PE3 installed PRNP G127V with 53% efficiency and 1.7% indels, whereas Cas9-initiated HDR installed this mutation with 6.9% efficiency and 53% indels (FIG. 43E and FIG. 43G). Thus, the ratio of editing:indels for HBB E6V installation, HBB E6V correction, and PRNP G127V installation on average was 270-fold higher for PE3 than for Cas9-initiated HDR.

[1403] Comparisons between PE3 and HDR in human cell lines other than HEK293T showed similar results, although with lower PE3 editing efficiencies. For example, in K562 cells, PE3-mediated 3-bp insertion into HEK3 proceeded with 25% efficiency and 2.8% indels, compared with 17% editing and 72% indels for Cas9-initiated HDR, a 40-fold editing:indel ratio advantage favoring PE3 (FIGS. 43F-43G). In U2OS cells, PE3 performed this 3-bp insertion with 22% efficiency and 2.2% indels, while Cas9-initiated HDR resulted in 15% editing with 74% indels, a 49-fold lower editing:indel ratio (FIGS. 43F-43G). In HeLa cells, PE3 made this insertion with 12% efficiency and 1.3% indels, versus 3.0% editing and 69% indels for Cas9-initiated HDR, a 210-fold editing:indel ratio difference (FIGS. 43F-43G). Collectively, these data indicated that HDR typically results in similar or lower editing efficiencies and far higher indels than PE3 in the four cell lines tested (FIGS. 51A-51G).

### Discussion and Future Directions

[1404] The ability to insert DNA sequences with single-nucleotide precision is an especially enabling prime editing capability. For example, PE3 was used to precisely insert into the HEK3 locus in HEK293T cells a His6tag (18 bp, 65% average efficiency), a FLAG epitope tag (24 bp, 18% average efficiency), and an extended LoxP site (44 bp, 23% average efficiency) that is the native substrate for Cre recombinase. Average indels ranged between 3.0% and 5.9% for these examples (FIG. 43H). Many biotechnological, synthetic biology, and therapeutic applications are envisioned to arise from the ability to efficiently and precisely introduce new DNA sequences into target sites of interest in living cells.

[1405] Collectively, the prime editing experiments described herein installed 18 insertions up to 44 bp, 22 deletions up to 80 bp, 113 point mutations including 77 transversions, and 18 combination edits, across 12 endogenous loci in the human and mouse genomes at locations ranging from 3 bp upstream to 29 bp downstream of the start of a PAM without making explicit double-stranded DNA breaks. These results establish prime editing as a remarkably versatile genome editing method. Because the overwhelming majority (85-99%) of insertions, deletions, indels, and duplications in ClinVar are ≤30 bp (FIGS. 52A-52D), in principle prime editing can correct up to ˜89% of the 75,122 currently known pathogenic human genetic variants in ClinVar (transitions, transversions, insertions, deletions, indels, and duplications in FIG. 38A), with additional potential to ameliorate diseases caused by copy number gain or loss.

[1406] Importantly, for any desired edit the flexibility of prime editing offers many possible choices of PEgRNA-induced nick locations, sgRNA-induced second nick locations, PBS lengths, RT template lengths, and which strand to edit first, as demonstrated extensively herein. This flexibility, which contrasts with more limited options typically available for other precision genome editing methods^{125,142,154}, allows editing efficiency, product purity, DNA specificity, or other parameters to be optimized to suit the needs of a given application, as shown in FIGS. 50A-50B in which testing 14 and 43 PEgRNAs covering a range of prime editing strategies optimized correction of pathogenic HBB and HEXA alleles, respectively.

[1407] Much additional research is needed to further understand and improve prime editing. Additional modifications of prime editor systems may be required to expand their compatibility to include other cell types, such as post-mitotic cells. Interfacing prime editing with viral and non-viral in vitro and in vivo delivery strategies is needed to fully explore the potential of prime editing to enable a wide range of applications including the study and treatment of genetic diseases. By enabling highly precise targeted transitions, transversions, small insertions, and small deletions in the genomes of mammalian cells without requiring double-stranded breaks or HDR, however, prime editing provides a new “search-and-replace” capability that substantially expands the scope of genome editing.

### Methods

### General Methods

[1408] DNA amplification was conducted by PCR using Phusion U Green Multiplex PCR Master Mix (ThermoFisher Scientific) or Q5 Hot Start High-Fidelity 2× Master Mix (New England BioLabs) unless otherwise noted. DNA oligonucleotides, including Cy5-labeled DNA oligonucleotides, dCas9 protein, and Cas9 H840A protein were obtained from Integrated DNA Technologies. Yeast reporter plasmids were derived from previously described plasmids64 and cloned by the Gibson assembly method. All mammalian editor plasmids used herein were assembled using the USER cloning method as previously described¹⁷⁵. Plasmids expressing sgRNAs were constructed by ligation of annealed oligonucleotides into BsmBI-digested acceptor vector. Plasmids expressing PEgRNAs were constructed by Gibson assembly or Golden Gate assembly using a custom acceptor plasmid (see supplemental ‘Golden Gate assembly’ outline). Sequences of sgRNA and PEgRNA constructs used herein are listed in Tables 2A-2C and Tables 3A-3R. All vectors for mammalian cell experiments were purified using Plasmid Plus Midiprep kits (Qiagen) or PureYield plasmid miniprep kits (Promega), which include endotoxin removal steps. All experiments using live animals were approved by the Broad Institute Institutional and Animal Care and Use Committees. Wild-type C57BL/6 mice were obtained from Charles River (#027).

### In Vitro Biochemical Assays

[1409] PEgRNAs and sgRNAs were transcribed in vitro using the HiScribe T7 in vitro transcription kit (New England Biolabs) from PCR-amplified templates containing a T7 promoter sequence. RNA was purified by denaturing urea PAGE and quality-confirmed by an analytical gel prior to use. 5′-Cy5-labeled DNA duplex substrates were annealed using two oligonucleotides (Cy5-AVA024 and AVA025; 1:1.1 ratio) for the non-nicked substrate or three oligonucleotides (Cy5-AVA023, AVA025 and AVA026; 1:1.1:1.1) for the pre-nicked substrate by heating to 95° C. for 3 minutes followed by slowly cooling to room temperature (Tables 2A-2C). Cas9 cleavage and reverse transcription reactions were carried out in 1×cleavage buffer²⁰⁵ supplemented with dNTPs (20 mM HEPES-K, pH 7.5; 100 mM KCl; 5% glycerol; 0.2 mM EDTA, pH 8.0; 3 mM MgCl2; 0.5 mM dNTP mix; 5 mM DTT). dCas9 or Cas9 H840A (5 μM final) and the sgRNA or PEgRNA (5 μM final) were pre-incubated at room temperature in a 5 μL reaction mixture for 10 minutes prior to the addition of duplex DNA substrate (400 nM final), followed by the addition of Superscript III reverse transcriptase (ThermoFisher Scientific), an undisclosed M-MLV RT variant, when applicable. Reactions were carried out at 37° C. for 1 hour, then diluted to a volume of 10 μL with water, treated with 0.2 μL of proteinase K solution (20 mg/mL, ThermoFisher Scientific), and incubated at room temperature for 30 minutes. Following heat inactivation at 95° C. for 10 minutes, reaction products were combined with 2× formamide gel loading buffer (90% formamide; 10% glycerol; 0.01% bromophenol blue), denatured at 95° C. for 5 minutes, and separated by denaturing urea-PAGE gel (15% TBE-urea, 55° C., 200V). DNA products were visualized by Cy5 fluorescence signal using a Typhoon FLA 7000 biomolecular imager.

[1410] Electrophoretic mobility shift assays were carried out in 1× binding buffer (1× cleavage buffer+10 μg/mL heparin) using pre-incubated dCas9:sgRNA or dCas9:PEgRNA complexes (concentration range between 5 nM and 1 μM final) and Cy5-labeled duplex DNA (Cy5-AVA024 and AVA025; 20 nM final). After 15 minutes of incubation at 37° C., the samples were analyzed by native PAGE gel (10% TBE) and imaged for Cy5 fluorescence.

[1411] For DNA sequencing of reverse transcription products, fluorescent bands were excised and purified from urea-PAGE gels, then 3′ tailed with terminal transferase (TdT; New England Biolabs) in the presence of dGTP or dATP according to the manufacturer's protocol. Tailed DNA products were diluted 10-fold with binding buffer (40% saturated aqueous guanidinium chloride+60% isopropanol) and purified by QIAquick spin column (Qiagen), then used as templates for primer extension by Klenow fragment (New England Biolabs) using primer AVA134 (A-tailed products) or AVA135 (G-tailed products) (Tables 2A-2C). Extension were amplified by PCR for 10 cycles using primers AVA110 and AVA122, then sequenced with AVA037 using the Sanger method (Tables 2A-2C).

### Yeast Fluorescent Reporter Assays

[1412] Dual fluorescent reporter plasmids containing an in-frame stop codon, a +1 frameshift, or a −1 frameshift were subjected to 5′-extended PEgRNA or 3′-extended PEgRNA prime editing reactions in vitro as described above. Following incubation at 37° C. for 1 hour, the reactions were diluted with water and plasmid DNA was precipitated with 0.3 M sodium acetate and 70% ethanol. Resuspended DNA was transformed into S. cerevisiae by electroporation as previously described⁶⁷ and plated on synthetic complete media without leucine (SC(glucose), L-). GFP and mCherry fluorescence signals were visualized from colonies with the Typhoon FLA 7000 biomolecular imager.

### General Mammalian Cell Culture Conditions

[1413] HEK293T (ATCC CRL-3216), U2OS (ATTC HTB-96), K562 (CCL-243), and HeLa (CCL-2) cells were purchased from ATCC and cultured and passaged in Dulbecco's Modified Eagle's Medium (DMEM) plus GlutaMAX (ThermoFisher Scientific), McCoy's 5A Medium (Gibco), RPMI Medium 1640 plus GlutaMAX (Gibco), or Eagle's Minimal Essential Medium (EMEM, ATCC), respectively, each supplemented with 10% (v/v) fetal bovine serum (Gibco, qualified) and 1× Penicillin Streptomycin (Corning). All cell types were incubated, maintained, and cultured at 37° C. with 5% CO2. Cell lines were authenticated by their respective suppliers and tested negative for mycoplasma.

### HEK293T Tissue Culture Transfection Protocol and Genomic DNA Preparation

[1414] HEK293T cells grown were seeded on 48-well poly-D-lysine coated plates (Corning). 16 to 24 hours post-seeding, cells were transfected at approximately 60% confluency with 1 μL of Lipofectamine 2000 (Thermo Fisher Scientific) according to the manufacturer's protocols and 750 ng of PE plasmid, 250 ng of PEgRNA plasmid, and 83 ng of sgRNA plasmid (for PE3 and PE3b). Unless otherwise stated, cells were cultured 3 days following transfection, after which the media was removed, the cells were washed with 1× PBS solution (Thermo Fisher Scientific), and genomic DNA was extracted by the addition of 150 μL of freshly prepared lysis buffer (10 mM Tris-HCl, pH 7.5; 0.05% SDS; 25 μg/mL Proteinase K (ThermoFisher Scientific)) directly into each well of the tissue culture plate. The genomic DNA mixture was incubated at 37° C. for 1 to 2 hours, followed by an 80° C. enzyme inactivation step for 30 minutes. Primers used for mammalian cell genomic DNA amplification are listed in Table 4. For HDR experiments in HEK293T cells, 231 ng of nuclease-expression plasmid, 69 ng of sgRNA expression plasmid, 50 ng (1.51 μmol) 100-nt ssDNA donor template (PAGE-purified; Integrated DNA Technologies) was lipofected using 1.4 μL Lipofectamine 2000 (ThermoFisher) per well. Genomic DNA from all HDR experiments was purified using the Agencourt DNAdvance Kit (Beckman Coulter), according to the manufacturer's protocol.

### High-Throughput DNA Sequencing of Genomic DNA Samples

[1415] Genomic sites of interest were amplified from genomic DNA samples and sequenced on an Illumina MiSeq as previously described with the following modifications^{129,130}. Briefly, amplification primers containing Illumina forward and reverse adapters (Table 4) were used for a first round of PCR (PCR 1) amplifying the genomic region of interest. 25 μL PCR 1 reactions were performed with 0.5 μM of each forward and reverse primer, 1 μL of genomic DNA extract and 12.5 μL, of Phusion U Green Multiplex PCR Master Mix. PCR reactions were carried out as follows: 98° C. for 2 minutes, then 30 cycles of [98° C. for 10 seconds, 61° C. for 20 seconds, and 72° C. for 30 seconds], followed by a final 72° C. extension for 2 minutes. Unique Illumina barcoding primer pairs were added to each sample in a secondary PCR reaction (PCR 2). Specifically, 25 μL of a given PCR 2 reaction contained 0.5 μM of each unique forward and reverse illumina barcoding primer pair, 1 μL of unpurified PCR 1 reaction mixture, and 12.5 μL of Phusion U Green Multiplex PCR 2× Master Mix. The barcoding PCR 2 reactions were carried out as follows: 98° C. for 2 minutes, then 12 cycles of [98° C. for 10 seconds, 61° C. for 20 seconds, and 72° C. for 30 seconds], followed by a final 72° C. extension for 2 minutes. PCR products were evaluated analytically by electrophoresis in a 1.5% agarose gel. PCR 2 products (pooled by common amplicons) were purified by electrophoresis with a 1.5% agarose gel using a QlAquick Gel Extraction Kit (Qiagen), eluting with 40 μL of water. DNA concentration was measured by fluorometric quantification (Qubit, ThermoFisher Scientific) or qPCR (KAPA Library Quantification Kit-Illumina, KAPA Biosystems) and sequenced on an Illumina MiSeq instrument according to the manufacturer's protocols.

[1416] Sequencing reads were demultiplexed using MiSeq Reporter (Illumina). Alignment of amplicon sequences to a reference sequence was performed using CRISPResso2¹⁷⁸. For quantification of point mutation editing, CRISPResso2 was run in standard mode with “discard_indel_reads” on. Editing efficiency was calculated as: (frequency of specified point mutation in non-discarded reads)×(#of non-discarded reads) ÷ total reads. For insertion or deletion edits, CRISPResso2 was run in HDR mode using the desired allele as the expected allele (e flag), and with “discard_indel_reads” ON. Editing yield was calculated as the number of HDR aligned reads divided by total reads. For all edits, indel yields were calculated as the number of discarded reads divided by total reads.

### Nucleofection of U2OS, K562, and HeLa Cells

[1417] Nucleofection was performed in all experiments using K562, HeLa, and U2OS cells. For PE conditions in these cell types, 800 ng prime editor-expression plasmid, 200 ng PEgRNA-expression plasmid, and 83 ng nicking plasmid was nucleofected in a final volume of 20 μL in a 16-well nucleocuvette strip (Lonza). For HDR conditions in these three cell types, 350 ng nuclease-expression plasmid, 150 ng sgRNA-expression plasmid and 200 pmol (6.6 μg) 100-nt ssDNA donor template (PAGE-purified; Integrated DNA Technologies) was nucleofected in a final volume of 20 μL, per sample in a 16-well Nucleocuvette strip (Lonza). K562 cells were nucleofected using the SF Cell Line 4D-Nucleofector X Kit (Lonza) with 5×10⁵ cells per sample (program FF-120), according to the manufacturers protocol. U2OS cells were nucleofected using the SE Cell Line 4D-Nucleofector X Kit (Lonza) with 3-4×10⁵ cells per sample (program DN-100), according to the manufacturers protocol. HeLa cells were nucleofected using the SE Cell Line 4D-Nucleofector X Kit (Lonza) with 2×10⁵ cells per sample (program CN-114), according to the manufacturers protocol. Cells were harvested 72 hours after nucleofection for genomic DNA extraction.

### Genomic DNA Extraction for HDR Experiments

[1418] Genomic DNA from all HDR comparison experiments in HEK293T, HEK293T HBB E6V, K562, U20S, and HeLa cells was purified using the Agencourt DNAdvance Kit (Beckman Coulter), according to the manufacturer's protocol.

### Comparison Between PE2, PE3, BE2, BE4max, ABEdmax, and ABEmax

[1419] HEK293T cells were seeded on 48-well poly-D-lysine coated plates (Corning). After 16 to 24 hours, cells were transfected at approximately 60% confluency. For base editing with CBE or ABE constructs, cells were transfected with 750 ng of base editor plasmid, 250 ng of sgRNA expression plasmid, and 1 μL of Lipofectamine 2000 (Thermo Fisher Scientific). PE transfections were performed as described above. Genomic DNA extraction for PE and BE was performed as described above.

### Determination of PE3 Activity at Known Cas9 Off-Target Sites

[1420] To evaluate PE3 off-target editing activity at known Cas9 off-target sites, genomic DNA extracted from HEK293T cells 3 days after transfection with PE3 was used as template for PCR amplification of 16 previously reported Cas9 off-target genomic sites^{118,159} (the top four off-target sites each for the HEK3, EMX1, FANCF, and HEK4 spacers; primer sequences are listed in Table 4). These genomic DNA samples were identical to those used for quantifying on-target PE3 editing activities shown in FIGS. 41A-41K; PEgRNA and nicking sgRNA sequences are listed in Tables 3A-3R. Following PCR amplification of off-target sites, amplicons were sequenced on the Illumina MiSeq platform as described above (HTS analysis). For determining Cas9 nuclease, Cas9 H840A nickase, dCas9, and PE2-dRT on-target and off-target editing activity, HEK293T cells were transfected with 750 ng of editor plasmid (Cas9 nuclease, Cas9 H840A nickase, dCas9, or PE2-dRT), 250 ng of PEgRNA or sgRNA plasmid, and 1 μL of Lipofectamine 2000. Genomic DNA was isolated from cells 3 days after transfection as described above. On-target and off-target genomic loci were amplified by PCR using primer sequences in Table 4 and sequenced on an Illumina MiSeq.

[1421] HTS data analysis was performed using CRISPResso2¹⁷⁸. The editing efficiencies of Cas9 nuclease, Cas9 H840A nickase, and dCas9 were quantified as the percent of total sequencing reads containing indels. For quantification of PE3 and PE3-dRT off-targets, aligned sequencing reads were examined for point mutations, insertions, or deletions that were consistent with the anticipated product of PEgRNA reverse transcription initiated at the Cas9 nick site. Single nucleotide variations occurring at <0.1% overall frequency among total reads within a sample were excluded from analysis. For reads containing single nucleotide variations that both occurred at frequencies≥0.1% and were partially consistent with the PEgRNA-encoded edit, t-tests (unpaired, one-tailed, α=0.5) were used to determine if the variants occurred at significantly higher levels compared to samples treated with PEgRNAs that contained the same spacer but encoded different edits. To avoid differences in sequencing errors, comparisons were made between samples that were sequenced simultaneously within the same MiSeq run. Variants that did not meet the criteria of p-value >0.05 were excluded. Off-target PE3 editing activity was then calculated as the percentage of total sequencing reads that met the above criteria.

### Generation of a HEK293T Cell Line Containing the HBB E6V Mutation Using Cas9-Initiated HDR

[1422] HEK293T cells were seeded in a 48-well plate and transfected at approximately 60% confluency with 1.5 μL of Lipofectamine 2000, 300 ng of Cas9 D10A nickase plasmid, 100 ng of sgRNA plasmid, and 200 ng of 100-mer ssDNA donor template (Table 5). Three days after transfection, media was exchanged for fresh media. Four days after transfection, cells were dissociated using 30 μL of TrypLE solution and suspended in 1.5 mL of media. Single cells were isolated into individual wells of two 96-well plates by fluorescence-activated cell sorting (FACS) (Beckman-Coulter Astrios). See FIGS. 53A-53B for representative FACS sorting examples. Cells were expanded for 14 days prior to genomic DNA sequencing as described above. Of the isolated clonal populations, none was found to be homozygous for the HBB E6V mutation, so a second round of editing by lipofection, sorting, and outgrowth was repeated in a partially edited cell line to yield a cell line homozygous for the E6V allele.

### Generation of a HEK293T Cell Line Containing the HBB E6V Mutation Using PE3

[1423] 2.5×104 HEK293T cells grown in the absence of antibiotic were seeded on 48-well poly-D-lysine coated plates (Corning). 16 to 24 hours post-seeding, cells were transfected at approximately 70% confluency with 1 μL of Lipofectamine 2000 (Thermo Fisher Scientific) according to the manufacturer's protocols and 750 ng of PE2-P2A-GFP plasmid, 250 ng of PEgRNA plasmid, and 83 ng of sgRNA plasmid. After 3 days post transfection, cells were washed with phosphate-buffered saline (Gibco) and dissociated using TrypLE Express (Gibco). Cells were then diluted with DMEM plus GlutaMax (Thermo Fisher Scientific) supplemented with 10% (v/v) FBS (Gibco) and passed through a 35-μm cell strainer (Corning) prior to sorting. Flow cytometry was carried out on a LE-MA900 cell sorter (Sony). Cells were treated with 3 nM DAPI (BioLegend) 15 minutes prior to sorting. After gating for doublet exclusion, single DAPI-negative cells with GFP fluorescence above that of a GFP-negative control cell population were sorted into 96-well flat-bottom cell culture plates (Corning) filled with pre-chilled DMEM with GlutaMax supplemented with 10% FBS. See FIGS. 53A-53B for representative FACS sorting examples. Cells were cultured for 10 days prior to genomic DNA extraction and characterization by HTS, as described above. A total of six clonal cell lines were identified that are homozygous for the E6V mutation in HBB.

### Generation of a HEK293T Cell Line Containing the HEXA 1278+TATC Insertion Using PE3

[1424] HEK293T cells containing the HEXA 1278+TATC allele were generated following the protocol described above for creation of the HBB E6V cell line; PEgRNA and sgRNA sequences are listed in Tables 2A-2C under the FIGS. 43A-43H subheading. After transfection and sorting, cells were cultured for 10 days prior to genomic DNA extraction and characterization by HTS, as described above. Two heterozygous cell lines were isolated that contained 50% HEXA 1278+TATC alleles, and two homozygous cell lines containing 100% HEXA 1278+TATC alleles were recovered.

### Cell Viability Assays

[1425] HEK293T cells were seeded in 48-well plates and transfected at approximately 70% confluency with 750 ng of editor plasmid (PE3, PE3 R110S K103L, Cas9 H840A nickase, or dCas9), 250 ng of HEK3-targeting PEgRNA plasmid, and 1 μL of Lipofectamine 2000, as described above. Cell viability was measured every 24 hours post-transfection for 3 days using the CellTiter-Glo 2.0 assay (Promega) according to the manufacturer's protocol. Luminescence was measured in 96-well flat-bottomed polystyrene microplates (Corning) using a M1000 Pro microplate reader (Tecan) with a 1-second integration time.

### Lentivirus Production

[1426] Lentivirus was produced as previously described²⁰⁶. T-75 flasks of rapidly dividing HEK293T cells (ATCC; Manassas, VA, USA) were transfected with lentivirus production helper plasmids pVSV-G and psPAX2 in combination with modified lentiCRISPR_v2 genomes carrying intein-split PE2 editor using FuGENE HD (Promega, Madison, WI, USA) according to the manufacturer's directions. Four split-intein editor constructs were designed: 1) a viral genome encoding a U6-PEgRNA expression cassette and the N-terminal portion (1-573) of Cas9 H840A nickase fused to the Npu N-intein, a self-cleaving P2A peptide, and GFP-KASH; 2) a viral genome encoding the Npu C-intein fused to the C-terminal remainder of PE2; 3) a viral genome encoding the Npu C-intein fused to the C-terminal remainder of Cas9 for the Cas9 control; and 4) a nicking sgRNA for DNMT1. The split-intein mediates trans splicing to join the two halves of PE2 or Cas9, while the P2A GFP-KASH enables co-translational production of a nuclear membrane-localized GFP. After 48 hours, supernatant was collected, centrifuged at 500 g for 5 minutes to remove cellular debris, and filtered using a 0.45 μm filter. Filtered supernatant was concentrated using the PEG-it Virus Precipitation Solution (System Biosciences, Palo Alto, CA, USA) according to the manufacturer's directions. The resulting pellet was resuspended in Opti-MEM (Thermo Fisher Scientific, Waltham, MA, USA) using 1% of the original media volume. Resuspended pellet was flash-frozen and stored at −80° C. until use.

### Mouse Primary Cortical Neuron Dissection and Culture

[1427] E18.5 dissociated cortical cultures were harvested from timed-pregnant C57BL/6 mice (Charles River). Embryos were harvested from pregnant mice after euthanasia by CO2 followed by decapitation. Cortical caps were dissected in ice-cold Hibernate-E supplemented with penicillin/streptomycin (Life Technologies). Following a rinse with ice-cold Hibernate-E, tissue was digested at 37° C. for 8 minutes in papain/DNase (Worthington/Sigma). Tissue was triturated in NBActiv4 (BrainBits) supplemented with DNase. Cells were counted and plated in 24-well plates at 100,000 cells per well. Half of the media was changed twice per week.

### Prime Editing in Primary Neurons and Nuclei Isolation

[1428] At DIV 1, 15 μL, of Lentivirus was Added at 10:10:1 Ratio of N-Terminal:C-terminal:nicking sgRNA. At DIV 14, neuronal nuclei were isolated using the EZ-PREP buffer (Sigma D8938) following the manufacturer's protocol. All steps were performed on ice or at 4° C. Media was removed from dissociated cultures, and cultures were washed with ice-cold PBS. PBS was aspirated and replaced with 200 μL EZ-PREP solution. Following a 5-minute incubation on ice, EZ-PREP was pipetted across the surface of the well to dislodge remaining cells. The sample was centrifuged at 500 g for 5 minutes, and the supernatant removed. Samples were washed with 200 μL EZ-PREP and centrifuged again at 500 g for 5 minutes. Samples were resuspended with gentle pipetting in 200 μL ice-cold Nuclei Suspension Buffer (NSB) consisting of 100 μg/mL BSA and 3.33 μM Vybrant DyeCycle Ruby (Thermo Fisher) in 1xPBS, then centrifuged at 500 g for 5 minutes. The supernatant was removed and nuclei were resuspended in 100 μL NSB and sorted into 100 μL Agencourt DNAdvance lysis buffer using a MoFlo Astrios (Beckman Coulter) at the Broad Institute flow cytometry facility. Genomic DNA was purified according to the manufacturer's Agencourt DNAdvance instructions.

### RNA-Sequencing and Data Analysis

[1429] HEK293T cells were co-transfected with PRNP-targeting or HEXA-targeting PEgRNAs and PE2, PE2-dRT, or Cas9 H840A nickase. 72 hours following transfection, total RNA was harvested from cells using TRIzol reagent (Thermo Fisher) and purified with RNeasy Mini kit (Qiagen) including on-column DNasel treatment. Ribosomes were depleted from total RNA using the rRNA removal protocol of the TruSeq Stranded Total RNA library prep kit (Illumina) and subsequently washed with RNAClean XP beads (Beckman Coulter). Sequencing libraries were prepared using ribo-depleted RNA on a SMARTer PrepX Apollo NGS library prep system (Takara) following the manufacturer's protocol. Resulting libraries were visualized on a 2200 TapeStation (Agilent Technologies), normalized using a Qubit dsDNA HS assay (Thermo Fisher), and sequenced on a NextSeq 550 using high output v2 flow cell (Illumina) as 75-bp paired-end reads. Fastq files were generated with bcl2fastq2 version 2.20 and trimmed using TrimGalore version 0.6.2 (github.com/FelixKrueger/TrimGalore) to remove low-quality bases, unpaired sequences, and adaptor sequences. Trimmed reads were aligned to a Homo sapiens genome assembly GRCh¹⁴⁸ with a custom Cas9 H840A gene entry using RSEM version 1.3.1²⁰⁷. The limma-voom²⁰⁸ package was used to normalize gene expression levels and perform differential expression analysis with batch effect correction. Differentially expressed genes were called with FDR-corrected p-value <0.05 and fold-change >2 cutoffs, and results were visualized in R.

### ClinVar Analysis

[1430] The ClinVar variant summary was downloaded from NCBI (accessed Jul. 15, 2019), and the information contained therein was used for all downstream analysis. The list of all reported variants was filtered by allele ID in order to remove duplicates and by clinical significance in order to restrict the analysis to pathogenic variants. The list of pathogenic variants was filtered sequentially by variant type in order to calculate the fraction of pathogenic variants that are insertions, deletions, etc. Single nucleotide variants (SNVs) were separated into two categories (transitions and transversions) based on the reported reference and alternate alleles. SNVs that did not report reference or alternate alleles were excluded from the analysis.

[1431] The lengths of reported insertions, deletions, and duplications were calculated using reference/alternate alleles, variant start/stop positions, or appropriate identifying information in the variant name. Variants that did not report any of the above information were excluded from the analysis. The lengths of reported indels (single variants that include both insertions and deletions relative to the reference genome) were calculated by determining the number of mismatches or gaps in the best pairwise alignment between the reference and alternate alleles. Frequency distributions of variant lengths were calculated using GraphPad Prism 8.

### Data Availability

[1432] High-throughput sequencing data are deposited to the NCBI Sequence Read Archive database. Plasmids encoding PE1, PE2/PE3, and PEgRNA expression vectors will be available from Addgene.

### Code Availability

[1433] The script used to quantify PEgRNA scaffold insertion is provided in FIGS. 60A-60B.

### Supplemental Information: Tables and Sequences

[1434] Table 1: Activities of prime editors, Cas9 nuclease, Cas9 H840A nickase, and PE2-dRT at HEK3, HEK4, EMX1, and FANCF on-target and off-target sites. PE2/PE3 editing is shown as % prime editing alongside % indels (in parentheses). % indels are shown for Cas9, Cas9 H840A nickase (nCas9), and PE2-dRT at the top four previously characterized off-target sites^{179,180}. sgRNA and PEgRNA sequences can be found in Tables 3A-3R, under the FIGS. 42A-42H heading. All values are the average of three independent biological replicates.

[1435] Tables 2A-2C: Sequences of DNA oligonucleotides, PEgRNAs, and sgRNAs used for in vitro experiments.

TABLE 2A
DNA oligonucleotides

| OLIGONU- | |
|---|---|
| CLEOTIDE | SEQUENCE |
| AVA023 | 5CY5-CCTGGGTCAATCCTTGGGGCCCAGACTGAGCACG |
| | (SEQ ID NO: 374) |
| AVA024 | 5CY5-CCTGGGTCAATCCTTGGGGCCCAGACTGAGCACG |
| | TGATGGCAGAGGAAAGG |
| | (SEQ ID NO: 375) |
| AVA025 | 5PHOS-CCTTTCCTCTGCCATCACGTGCTCAGTCTGGGC |
| | CCCAAGGATTGACCCAGG |
| | (SEQ ID NO: 376) |
| AVA026 | 5PHOS-TGATGGCAGAGGAAAGG |
| | (SEQ ID NO: 377) |
| AVA037 | GCAGGCTTTAAAGGAACCAATTC |
| | (SEQ ID NO: 378) |
| AVA110 | GCAGGCTTTAAAGGAACCAATTCCCTGGGTCAATCCTT |
| | GGGGC |
| | (SEQ ID NO: 379) |
| AVA122 | CTCTGGAGGATCTAGCGGAG |
| | (SEQ ID NO: 380) |
| AVA134 | CTCTGGAGGATCTAGCGGAGTTTTTTTTTTTTTTTTT |
| | TTT |
| | (SEQ ID NO: 381) |
| AVA135 | CTCTGGAGGATCTAGCGGAGCCCCCCCCCCCCCC |
| | (SEQ ID NO: 382) |

TABLE 2B
5′-extended PEgRNAs

| | | | LINKER | PBS | RT |
|---|---|---|---|---|---|
| | SPACER | 5′ EXTENSION | LENGTH | LENGTH | TEMPLATE |
| PEGRNA | SEQUENCE | SEQUENCE | (NT) | (NT) | LENGTH (NT) |
| PEGRNA 1 | GGCCCAGACTG | GGCTAACCGTGCCATT | 15 | 5 | 7 |
| | AGCACGTGA | TGATCAGGTCA | | | |
| | (SEQ ID NO: 383) | (SEQ ID NO: 429) | | | |
| PEGRNA 2 | GGCCCAGACTG | GGCTAACCGTGCAAA | 15 | 5 | 7 |
| | AGCACGTGA | TTAACAAACTAA | | | |
| | (SEQ ID NO: 384) | (SEQ ID NO: 430) | | | |
| PEGRNA 3 | GGCCCAGACTG | GGCCATCTCGTGCAA | 15 | 5 | 8 |
| | AGCACGTGA | ATTAACAAACTAA | | | |
| | (SEQ ID NO: 385) | (SEQ ID NO: 431) | | | |
| PEGRNA 4 | GGCCCAGACTG | GGTCCTCTGCCATCTC | 15 | 5 | 15 |
| | AGCACGTGA | GTGCAAATTAACAAA | | | |
| | (SEQ ID NO: 386) | CTAA(SEQ ID NO: 432) | | | |
| PEGRNA 5 | GGCCCAGACTG | GGCTTCCTTTCCTCTG | 15 | 5 | 22 |
| | AGCACGTGA | CCATCTCGTGCAAATT | | | |
| | (SEQ ID NO: 387) | AACAAACTAA | | | |
| | | (SEQ ID NO: 433) | | | |
| 5′-PEGRNA_RT_7_A | GGCCCAGACTG | GGCTAACCGTGCCATT | 15 | 5 | 7 |
| | AGCACGTGA | TGATCAGGTCA | | | |
| | (SEQ ID NO: 388) | (SEQ ID NO: 434) | | | |
| 5′-PEGRNA_RT_7_B | GGCCCAGACTG | GGCTAACCGTGCAAA | 15 | 5 | 7 |
| | AGCACGTGA | TTAACAAACTAA | | | |
| | (SEQ ID NO: 389) | (SEQ ID NO: 435) | | | |
| 5′-PEGRNA_RT_8 | GGCCCAGACTG | GGCCATCTCGTGCAA | 15 | 5 | 8 |
| | AGCACGTGA | ATTAACAAACTAA | | | |
| | (SEQ ID NO: 390) | (SEQ ID NO: 436) | | | |
| 5′-PEGRNA_RT_15 | GGCCCAGACTG | GGTCCTCTGCCATCTC | 15 | 5 | 15 |
| | AGCACGTGA | GTGCAAATTAACAAA | | | |
| | (SEQ ID NO: 391) | CTAA(SEQ ID NO: 437) | | | |
| 5′-PEGRNA_RT_15 | GGCCCAGACTG | GGCTTCCTTTCCTCTG | | | |
| | AGCACGTGA | CCATCTCGTGCAAATT | 15 | 5 | 22 |
| | (SEQ ID NO: 392) | AACAAACTAA | | | |
| | | (SEQ ID NO: 438) | | | |

TABLE 2C
3′-extended PEgRNAs

| | | | | RT |
|---|---|---|---|---|
| | | 3′ | PBS | TEMPLATE |
| | SPACER | EXTENSION | LENGTH | LENGTH |
| PEGRNA | SEQUENCE | SEQUENCE | (NT) | (NT) |
| 3′-PEGRNA_10 | GGCCCAGACTGAG | TCTGCCATCTCG | 7 | 10 |
| | CACGTGA(SEQ ID | TGCTC (SEQ ID | | |
| | NO: 506) | NO: 439) | | |
| 3′- | GGCCCAGACTGAG | TCTGCCATCTCG | 7 | 10 |
| PEGRNA_YEAST_ | CACGTGA(SEQ ID | TGCTC(SEQ ID | | |
| TTOA | NO: 507) | NO: 440) | | |
| 3′- | GGCCCAGACTGAG | TCTGCCATCATC | 7 | 11 |
| PEGRNA_YEAST_ | CACGTGA(SEQ ID | GTGCTC(SEQ ID | | |
| +1AINS | NO: 508) | NO: 441) | | |
| 3′- | GGCCCAGACTGAG | TCTGCCATCCGT | 7 | 9 |
| PEGRNA_YEAST_ | CACGTGA(SEQ ID | GCTC(SEQ ID | | |
| +1TDEL | NO: 509) | NO: 442) | | |

[1436] Tables 3A-3R: Sequences of PEgRNAs and sgRNAs used in mammalian cell experiments. All sequences are shown in 5′ to 3′ orientation. To construct PEgRNAs, spacer sequences listed below were added to the 5′ end of the sgRNA scaffold and the 3′ extensions listed below containing the primer binding site and RT template were added to the 3′ end of the sgRNA scaffold. The sgRNA scaffold sequence is

(SEQ ID NO: 131)
GTTTTAGAGCTAGAAATAGCAAGTTAAAATAAGGCTAGTCCGTTATCAAC
TTGAAAAAGTGGCACCGAGTCGGTGC.

TABLE 3A
FIGs. 39A-39D PEgRNA

| | | | | RT |
|---|---|---|---|---|
| | SPACER SEQUENCE | | PBS | TEMPLATE |
| | (SEQ ID NOS: | 3′ EXTENSION (SEQ ID | LENGTH | LENGTH |
| PEGRNA | 2890-2996) | NOS: 2997-3103) | (NT) | (NT) |
| HEK3_2B- | GGCCCAGACTGAG | TCTGCCATCTCGTGCTCA | 8 | 10 |
| C_8 | CACGTGA | | | |
| HEK3_2B- | GGCCCAGACTGAG | TCTGCCATCTCGTGCTCAG | 9 | 10 |
| C_9 | CACGTGA | | | |
| HEK3_2B- | GGCCCAGACTGAG | TCTGCCATCTCGTGCTCA | 10 | 10 |
| C_10 | CACGTGA | GT | | |
| HEK3_2B- | GGCCCAGACTGAG | TCTGCCATCTCGTGCTCA | 11 | 10 |
| C_11 | CACGTGA | GTC | | |
| HEK3_2B- | GGCCCAGACTGAG | TCTGCCATCTCGTGCTCA | 12 | 10 |
| C_12 | CACGTGA | GTCT | | |
| HEK3_2B- | GGCCCAGACTGAG | TCTGCCATCTCGTGCTCA | 13 | 10 |
| C_13 | CACGTGA | GTCTG | | |
| HEK3_2B- | GGCCCAGACTGAG | TCTGCCATCTCGTGCTCA | 14 | 10 |
| C_14 | CACGTGA | GTCTGG | | |
| HEK3_2B- | GGCCCAGACTGAG | TCTGCCATCTCGTGCTCA | 15 | 10 |
| C_15 | CACGTGA | GTCTGGG | | |
| HEK3_2C_ | GGCCCAGACTGAG | TCTGCCATCTCGTGCTCA | 16 | 10 |
| 16 | CACGTGA | GTCTGGGC | | |
| HEK3_2C_ | GGCCCAGACTGAG | TCTGCCATCTCGTGCTCA | 17 | 10 |
| 17 | CACGTGA | GTCTGGGCC | | |
| EMX1_2C_ | GAGTCCGAGCAGA | ATGGGAGCACTTCTTCTT | 9 | 13 |
| 9 | AGAAGAA | CTGC | | |
| EMX1_2C_ | GAGTCCGAGCAGA | ATGGGAGCACTTCTTCTT | 10 | 13 |
| 10 | AGAAGAA | CTGCT | | |
| EMX1_2C_ | GAGTCCGAGCAGA | ATGGGAGCACTTCTTCTT | 11 | 13 |
| 11 | AGAAGAA | CTGCTC | | |
| EMX1_2C_ | GAGTCCGAGCAGA | ATGGGAGCACTTCTTCTT | 12 | 13 |
| 12 | AGAAGAA | CTGCTCG | | |
| EMX1_2C_ | GAGTCCGAGCAGA | ATGGGAGCACTTCTTCTT | 13 | 13 |
| 13 | AGAAGAA | CTGCTCGG | | |
| EMX1_2C_ | GAGTCCGAGCAGA | ATGGGAGCACTTCTTCTT | 14 | 13 |
| 14 | AGAAGAA | CTGCTCGGA | | |
| EMX1_2C_ | GAGTCCGAGCAGA | ATGGGAGCACTTCTTCTT | 15 | 13 |
| 15 | AGAAGAA | CTGCTCGGAC | | |
| EMX1_2C_ | GAGTCCGAGCAGA | ATGGGAGCACTTCTTCTT | 16 | 13 |
| 16 | AGAAGAA | CTGCTCGGACT | | |
| EMX1_2C_ | GAGTCCGAGCAGA | ATGGGAGCACTTCTTCTT | 17 | 13 |
| 17 | AGAAGAA | CTGCTCGGACTC | | |
| FANCF_2C_8 | GGAATCCCTTCTGC | GGAAAAGCGATCAAGGT | 8 | 17 |
| | AGCACC | GCTGCAGA | | |
| FANCF_2C_9 | GGAATCCCTTCTGC | GGAAAAGCGATCAAGGT | 9 | 17 |
| | AGCACC | GCTGCAGAA | | |
| FANCF_2C_ | GGAATCCCTTCTGC | GGAAAAGCGATCAAGGT | 10 | 17 |
| 10 | AGCACC | GCTGCAGAAG | | |
| FANCF_2C_ | GGAATCCCTTCTGC | GGAAAAGCGATCAAGGT | 11 | 17 |
| 11 | AGCACC | GCTGCAGAAGG | | |
| FANCF_2C_ | GGAATCCCTTCTGC | GGAAAAGCGATCAAGGT | 12 | 17 |
| 12 | AGCACC | GCTGCAGAAGGG | | |
| FANCF_2C_ | GGAATCCCTTCTGC | GGAAAAGCGATCAAGGT | 13 | 17 |
| 13 | AGCACC | GCTGCAGAAGGGA | | |
| FANCF_2C_ | GGAATCCCTTCTGC | GGAAAAGCGATCAAGGT | 14 | 17 |
| 14 | AGCACC | GCTGCAGAAGGGAT | | |
| FANCF_2C_ | GGAATCCCTTCTGC | GGAAAAGCGATCAAGGT | 15 | 17 |
| 15 | AGCACC | GCTGCAGAAGGGATT | | |
| FANCF_2C_ | GGAATCCCTTCTGC | GGAAAAGCGATCAAGGT | 16 | 17 |
| 16 | AGCACC | GCTGCAGAAGGGATTC | | |
| FANCF_2C_ | GGAATCCCTTCTGC | GGAAAAGCGATCAAGGT | 17 | 17 |
| 17 | AGCACC | GCTGCAGAAGGGATTCC | | |
| RNF2_2C_9 | GTCATCTTAGTCAT | GAACACCTCATGTAATG | 9 | 11 |
| | TACCTG | ACT | | |
| RNF2_2C_10 | GTCATCTTAGTCAT | GAACACCTCATGTAATG | 10 | 11 |
| | TACCTG | ACTA | | |
| RNF2_2C_11 | GTCATCTTAGTCAT | GAACACCTCATGTAATG | 11 | 11 |
| | TACCTG | ACTAA | | |
| RNF2_2C_12 | GTCATCTTAGTCAT | GAACACCTCATGTAATG | 12 | 11 |
| | TACCTG | ACTAAG | | |
| RNF2_2C_13 | GTCATCTTAGTCAT | GAACACCTCATGTAATG | 13 | 11 |
| | TACCTG | ACTAAGA | | |
| RNF2_2C_14 | GTCATCTTAGTCAT | GAACACCTCATGTAATG | 14 | 11 |
| | TACCTG | ACTAAGAT | | |
| RNF2_2C_15 | GTCATCTTAGTCAT | GAACACCTCATGTAATG | 15 | 11 |
| | TACCTG | ACTAAGATG | | |
| RNF2_2C_16 | GTCATCTTAGTCAT | GAACACCTCATGTAATG | 16 | 11 |
| | TACCTG | ACTAAGATGA | | |
| RNF2_2C_17 | GTCATCTTAGTCAT | GAACACCTCATGTAATG | 17 | 11 |
| | TACCTG | ACTAAGATGAC | | |
| HEK4_2C_7 | GGCACTGCGGCTG | GCTTTAACCCCAACCTC | 7 | 13 |
| | GAGGTGG | CAG | | |
| HEK4_2C_8 | GGCACTGCGGCTG | GCTTTAACCCCAACCTC | 8 | 13 |
| | GAGGTGG | CAGC | | |
| HEK4_2C_9 | GGCACTGCGGCTG | GCTTTAACCCCAACCTC | 9 | 13 |
| | GAGGTGG | CAGCC | | |
| HEK4_2C_10 | GGCACTGCGGCTG | GCTTTAACCCCAACCTC | 10 | 13 |
| | GAGGTGG | CAGCCG | | |
| HEK4_2C_11 | GGCACTGCGGCTG | GCTTTAACCCCAACCTC | 11 | 13 |
| | GAGGTGG | CAGCCGC | | |
| HEK4_2C_12 | GGCACTGCGGCTG | GCTTTAACCCCAACCTC | 12 | 13 |
| | GAGGTGG | CAGCCGCA | | |
| HEK4_2C_13 | GGCACTGCGGCTG | GCTTTAACCCCAACCTC | 13 | 13 |
| | GAGGTGG | CAGCCGCAG | | |
| HEK4_2C_14 | GGCACTGCGGCTG | GCTTTAACCCCAACCTC | 14 | 13 |
| | GAGGTGG | CAGCCGCAGT | | |
| HEK4_2C_15 | GGCACTGCGGCTG | GCTTTAACCCCAACCTC | 15 | 13 |
| | GAGGTGG | CAGCCGCAGTG | | |
| HEK3_2C_ | GGCCCAGACTGAG | TCTGCCATCCGTGCTCAG | 13 | 10 |
| 1TDEL | CACGTGA | TCTG | | |
| HEK3_2C_ | GGCCCAGACTGAG | TCTGCCATCATCGTGCTC | 13 | 10 |
| 1AINS | CACGTGA | AGTCTG | | |
| HEK3_2C_ | GGCCCAGACTGAG | TCTGCCATCAAAGCGTG | 13 | 10 |
| 1CTTINS | CACGTGA | CTCAGTCTG | | |
| HEK3_2D_10 | GGCCCAGACTGAG | TCTGCCATCTCGTGCTCA | 13 | 10 |
| | CACGTGA | GTCTG | | |
| HEK3_2D_11 | GGCCCAGACTGAG | CTCTGCCATCTCGTGCTC | 13 | 11 |
| | CACGTGA | AGTCTG | | |
| HEK3_2D_12 | GGCCCAGACTGAG | CCTCTGCCATCTCGTGCT | 13 | 12 |
| | CACGTGA | CAGTCTG | | |
| HEK3_2D_13 | GGCCCAGACTGAG | TCCTCTGCCATCTCGTGC | 13 | 13 |
| | CACGTGA | TCAGTCTG | | |
| HEK3_2D_14 | GGCCCAGACTGAG | TTCCTCTGCCATCTCGTG | 13 | 14 |
| | CACGTGA | CTCAGTCTG | | |
| HEK3_2D_15 | GGCCCAGACTGAG | TTTCCTCTGCCATCTCGT | 13 | 15 |
| | CACGTGA | GCTCAGTCTG | | |
| HEK3_2D_16 | GGCCCAGACTGAG | CTTTCCTCTGCCATCTCG | 13 | 16 |
| | CACGTGA | TGCTCAGTCTG | | |
| HEK3_2D_17 | GGCCCAGACTGAG | CCTTTCCTCTGCCATCTC | 13 | 17 |
| | CACGTGA | GTGCTCAGTCTG | | |
| HEK3_2D_18 | GGCCCAGACTGAG | TCCTTTCCTCTGCCATCT | 13 | 18 |
| | CACGTGA | CGTGCTCAGTCTG | | |
| HEK3_2D_19 | GGCCCAGACTGAG | TTCCTTTCCTCTGCCATC | 13 | 19 |
| | CACGTGA | TCGTGCTCAGTCTG | | |
| HEK3_2D_20 | GGCCCAGACTGAG | CTTCCTTTCCTCTGCCAT | 13 | 20 |
| | CACGTGA | CTCGTGCTCAGTCTG | | |
| EMX1_2D_ | GAGTCCGAGCAGA | GGAGCCCTTGTTCTTCTG | 13 | 10 |
| 10 | AGAAGAA | CTCGG | | |
| EMX1_2D_ | GAGTCCGAGCAGA | GGGAGCCCTTGTTCTTCT | 13 | 11 |
| 11 | AGAAGAA | GCTCGG | | |
| EMX1_2D_ | GAGTCCGAGCAGA | TGGGAGCCCTTGTTCTTC | 13 | 12 |
| 12 | AGAAGAA | TGCTCGG | | |
| EMX1_2D_ | GAGTCCGAGCAGA | ATGGGAGCCCTTGTTCTT | 13 | 13 |
| 13 | AGAAGAA | CTGCTCGG | | |
| EMX1_2D_ | GAGTCCGAGCAGA | GATGGGAGCCCTTGTTC | 13 | 14 |
| 14 | AGAAGAA | TTCTGCTCGG | | |
| EMX1_2D_ | GAGTCCGAGCAGA | TGATGGGAGCCCTTGTT | 13 | 15 |
| 15 | AGAAGAA | CTTCTGCTCGG | | |
| EMX1_2D_ | GAGTCCGAGCAGA | GTGATGGGAGCCCTTGT | 13 | 16 |
| 16 | AGAAGAA | TCTTCTGCTCGG | | |
| EMX1_2D_ | GAGTCCGAGCAGA | TGTGATGGGAGCCCTTG | 13 | 17 |
| 17 | AGAAGAA | TTCTTCTGCTCGG | | |
| EMX1_2D_ | GAGTCCGAGCAGA | ATGTGATGGGAGCCCTT | 13 | 18 |
| 18 | AGAAGAA | GTTCTTCTGCTCGG | | |
| EMX1_2D_ | GAGTCCGAGCAGA | GATGTGATGGGAGCCCT | 13 | 19 |
| 19 | AGAAGAA | TGTTCTTCTGCTCGG | | |
| EMX1_2D_ | GAGTCCGAGCAGA | TGATGTGATGGGAGCCC | 13 | 20 |
| 20 | AGAAGAA | TTGTTCTTCTGCTCGG | | |
| FANCF_2D_ | GGAATCCCTTCTGC | CGATCAAGGTGCTGCAG | 13 | 10 |
| 10 | AGCACC | AAGGGA | | |
| FANCF_2D_ | GGAATCCCTTCTGC | GCGATCAAGGTGCTGCA | 13 | 11 |
| 11 | AGCACC | GAAGGGA | | |
| FANCF_2D_ | GGAATCCCTTCTGC | AGCGATCAAGGTGCTGC | 13 | 12 |
| 12 | AGCACC | AGAAGGGA | | |
| FANCF_2D_ | GGAATCCCTTCTGC | AAGCGATCAAGGTGCTG | 13 | 13 |
| 13 | AGCACC | CAGAAGGGA | | |
| FANCF_2D_ | GGAATCCCTTCTGC | AAAGCGATCAAGGTGCT | 13 | 14 |
| 14 | AGCACC | GCAGAAGGGA | | |
| FANCF_2D_ | GGAATCCCTTCTGC | AAAAGCGATCAAGGTGC | 13 | 15 |
| 15 | AGCACC | TGCAGAAGGGA | | |
| FANCF_2D_ | GGAATCCCTTCTGC | GAAAAGCGATCAAGGTG | 13 | 16 |
| 16 | AGCACC | CTGCAGAAGGGA | | |
| FANCF_2D_ | GGAATCCCTTCTGC | GGAAAAGCGATCAAGGT | 13 | 17 |
| 17 | AGCACC | GCTGCAGAAGGGA | | |
| FANCF_2D_ | GGAATCCCTTCTGC | CGGAAAAGCGATCAAGG | 13 | 18 |
| 18 | AGCACC | TGCTGCAGAAGGGA | | |
| FANCF_2D_ | GGAATCCCTTCTGC | TCGGAAAAGCGATCAAG | 13 | 19 |
| 19 | AGCACC | GTGCTGCAGAAGGGA | | |
| FANCF_2D_ | GGAATCCCTTCTGC | CTCGGAAAAGCGATCAA | 13 | 20 |
| 20 | AGCACC | GGTGCTGCAGAAGGGA | | |
| RNF2_2D_10 | GTCATCTTAGTCAT | AACACCTCATGTAATGA | 15 | 10 |
| | TACCTG | CTAAGATG | | |
| RNF2_2D_11 | GTCATCTTAGTCAT | GAACACCTCATGTAATG | 15 | 11 |
| | TACCTG | ACTAAGATG | | |
| RNF2_2D_12 | GTCATCTTAGTCAT | CGAACACCTCATGTAAT | 15 | 12 |
| | TACCTG | GACTAAGATG | | |
| RNF2_2D_13 | GTCATCTTAGTCAT | ACGAACACCTCATGTAA | 15 | 13 |
| | TACCTG | TGACTAAGATG | | |
| RNF2_2D_14 | GTCATCTTAGTCAT | AACGAACACCTCATGTA | 15 | 14 |
| | TACCTG | ATGACTAAGATG | | |
| RNF2_2D_15 | GTCATCTTAGTCAT | CAACGAACACCTCATGT | 15 | 15 |
| | TACCTG | AATGACTAAGATG | | |
| RNF2_2D_16 | GTCATCTTAGTCAT | ACAACGAACACCTCATG | 15 | 16 |
| | TACCTG | TAATGACTAAGATG | | |
| RNF2_2D_17 | GTCATCTTAGTCAT | TACAACGAACACCTCAT | 15 | 17 |
| | TACCTG | GTAATGACTAAGATG | | |
| RNF2_2D_18 | GTCATCTTAGTCAT | TTACAACGAACACCTCA | 15 | 18 |
| | TACCTG | TGTAATGACTAAGATG | | |
| RNF2_2D_19 | GTCATCTTAGTCAT | GTTACAACGAACACCTC | 15 | 19 |
| | TACCTG | ATGTAATGACTAAGATG | | |
| RNF2_2D_20 | GTCATCTTAGTCAT | AGTTACAACGAACACCT | 15 | 20 |
| | TACCTG | CATGTAATGACTAAGATG | | |
| HEK4_2D_7 | GGCACTGCGGCTG | ACCCCAACCTCCAGCCGC | 11 | 7 |
| | GAGGTGG | | | |
| HEK4_2D_8 | GGCACTGCGGCTG | AACCCCAACCTCCAGCC | 11 | 8 |
| | GAGGTGG | GC | | |
| HEK4_2D_9 | GGCACTGCGGCTG | TAACCCCAACCTCCAGC | 11 | 9 |
| | GAGGTGG | CGC | | |
| HEK4_2D_10 | GGCACTGCGGCTG | TTAACCCCAACCTCCAG | 11 | 10 |
| | GAGGTGG | CCGC | | |
| HEK4_2D_11 | GGCACTGCGGCTG | TTTAACCCCAACCTCCA | 11 | 11 |
| | GAGGTGG | GCCGC | | |
| HEK4_2D_12 | GGCACTGCGGCTG | CTTTAACCCCAACCTCC | 11 | 12 |
| | GAGGTGG | AGCCGC | | |
| HEK4_2D_13 | GGCACTGCGGCTG | GCTTTAACCCCAACCTC | 11 | 13 |
| | GAGGTGG | CAGCCGC | | |
| HEK4_2D_14 | GGCACTGCGGCTG | CGCTTTAACCCCAACCT | 11 | 14 |
| | GAGGTGG | CCAGCCGC | | |
| HEK4_2D_15 | GGCACTGCGGCTG | CCGCTTTAACCCCAACC | 11 | 15 |
| | GAGGTGG | TCCAGCCGC | | |
| HEK4_2D_16 | GGCACTGCGGCTG | TCCGCTTTAACCCCAAC | 11 | 16 |
| | GAGGTGG | CTCCAGCCGC | | |
| HEK4_2D_17 | GGCACTGCGGCTG | CTCCGCTTTAACCCCAA | 11 | 17 |
| | GAGGTGG | CCTCCAGCCGC | | |
| HEK4_2D_18 | GGCACTGCGGCTG | CTCCGCTTTAACCCCAA | 11 | 18 |
| | GAGGTGG | CCTCCAGCCGC | | |
| HEK4_2D_19 | GGCACTGCGGCTG | CTCCGCTTTAACCCCAA | 11 | 19 |
| | GAGGTGG | CCTCCAGCCGC | | |

TABLE 3B
FIGS. 40A-40C PEgRNA

| | | | | RT |
|---|---|---|---|---|
| | SPACER SEQUENCE | | PBS | TEMPLATE |
| | (SEQ ID NO: | 3′ EXTENSION (SEQ ID | LENGTH | LENGTH |
| PEGRNA | 3104-3112) | NOS: 3113-3121) | (NT) | (NT) |
| RNF2_3B | GTCATCTTAGTCAT | AACGAACACCTCATGTA | 15 | 14 |
| | TACCTG | ATGACTAAGATG | | |
| EMX1_3B | GAGTCCGAGCAGA | ATGGGAGCACTTCTTCT | 15 | 13 |
| | AGAAGAA | TCTGCTCGGAC | | |
| FANCF_3B | GGAATCCCTTCTG | GGAAAAGCGATCAAGGT | 15 | 17 |
| | CAGCACC | GCTGCAGAAGGGATT | | |
| HE3_3B | GGCCCAGACTGAG | TCTGCCATGACGTGCTC | 13 | 10 |
| | CACGTGA | AGTCTG | | |
| HEK4_3B | GGCACTGCGGCTG | TTAACCCCAACCTCCAG | 9 | 10 |
| | GAGGTGG | CC | | |
| RNF2_3C_4ATOC | GTCATCTTAGTCAT | AACGAACACCGCAGGTA | 15 | 14 |
| | TACCTG | ATGACTAAGATG | | |
| RNF2_3C_4ATOG | GTCATCTTAGTCAT | AACGAACACCCCAGGTA | 15 | 14 |
| | TACCTG | ATGACTAAGATG | | |
| FANCF_3C_5GTOT | GGAATCCCTTCTG | GGAAAAGCGATCAAGGT | 13 | 17 |
| | CAGCACC | GCTGCAGAAGGGA | | |
| FANCF_3C_7ATOC | GGAATCCCTTCTG | GGAAAAGCGAGCCAGG | 14 | 17 |
| | CAGCACC | TGCTGCAGAAGGGAT | | |

TABLE 3C
FIGS. 40A-40C nicking sgRNA sequences

| | | SEQ ID |
|---|---|---|
| NICKING SGRNA | SPACER SEQUENCE | NO: |
| RNF2_2B_+41 | GTCAACCATTAAGCAAAACAT | 3122 |
| RNF2_2B_+67 | GTCTCAGGCTGTGCAGACAAA | 3123 |
| EMX1_2B_−116 | GGGGCACAGATGAGAAACTC | 3124 |
| EMX1_2B_−57 | GCCGTTTGTACTTTGTCCTC | 3125 |
| EMX1_2B_+14 | GCGCCACCGGTTGATGTGAT | 3126 |
| EMX1_2B_+27 | GCTTCGTGGCAATGCGCCAC | 3127 |
| EMX1_2B_+53 | GACATCGATGTCCTCCCCAT | 3128 |
| EMX1_2B_+80 | GTGGTTGCCCACCCTAGTCAT | 3129 |
| FANCF_2B_−78 | GCGACTCTCTGCGTACTGAT | 3130 |
| FANCF_2B_−50 | GCCCTACTTCCGCTTTCACCT | 3131 |
| FANCF_2B_−27 | GGATTCCATGAGGTGCGCGA | 3132 |
| FANCF_2B_−17 | GCTGCAGAAGGGATTCCATG | 3133 |
| FANCF_2B_+21 | GCTTGAGACCGCCAGAAGCT | 3134 |
| FANCF_2B_+48 | GGGGTCCCAGGTGCTGACGT | 3135 |
| HEK3_2B_−108 | GCAGAAATAGACTAATTGCA | 3136 |
| HEK3_2B_−38 | GGATTGACCCAGGCCAGGGC | 3137 |
| HEK3_2B_+26 | GACGCCCTCTGGAGGAAGCA | 3138 |
| HEK3_2B_+37 | GCTGTCCTGCGACGCCCTC | 3139 |
| HEK3_2B_+63 | GCACATACTAGCCCCTGTCT | 3140 |
| HEK3_2B_+90 | GTCAACCAGTATCCCGGTGC | 3141 |
| HEK4_2B_−95 | TCCCTTCCTTCCACCCAGCC | 3142 |
| HEK4_2B_−51 | CCCTGCCTGTCATCCTGCTT | 3143 |
| HEK4_2B_−26 | GCAGTGCCACCGGGGCGCCG | 3144 |
| HEK4_2B_+52 | GCGGGGGCTCAGAGAGGGCA | 3145 |
| HEK4_2B_+74 | GAGACACACACACAGGCCTGG | 3146 |
| RNF2_2C_+41 | GTCAACCATTAAGCAAAACAT | 3147 |
| RNF2_2C_4ATOC_+5 | GTGAGTTACAACGAACACCGC | 3148 |
| RNF2_2C_4ATOG_+5 | GTGAGTTACAACGAACACCCC | 3149 |
| FANCF_2C_+48 | GGGGTCCCAGGTGCTGACGT | 3150 |
| FANCF_2C_5GTOT_+7 | GAAGCTCGGAAAAGCGATCA | 3151 |
| FANCF_2C_7ATOC_+7 | GAAGCTCGGAAAAGCGAGCC | 3152 |
| HEK3_2C_+90 | GTCAACCAGTATCCCGGTGC | 3153 |

TABLE 3D
FIGS. 41A-41K PEgRNA

| | | | | RT |
|---|---|---|---|---|
| | SPACER SEQUENCE | | PBS | TEMPLATE |
| | (SEQ ID NO: | 3′ EXTENSION (SEQ ID | LENGTH | LENGTH |
| PEGRNA | 3154-3304) | NOS: 3305-3455) | (NT) | (NT) |
| HEK3_4A_ | GGCCCAGACTGAG | TCTGCCATCTCGTGCTCA | 13 | 10 |
| 1TTOA | CACGTGA | GTCTG | | |
| HEK3_4A_ | GGCCCAGACTGAG | TCTGCCATCGCGTGCTCA | 13 | 10 |
| 1TTOC | CACGTGA | GTCTG | | |
| HEK3_4A_ | GGCCCAGACTGAG | TCTGCCATCCCGTGCTCA | 13 | 10 |
| 1TTOG | CACGTGA | GTCTG | | |
| HEK3_4A_ | GGCCCAGACTGAG | TCTGCCATTACGTGCTCA | 13 | 10 |
| 2GTOA | CACGTGA | GTCTG | | |
| HEK3_4A_ | GGCCCAGACTGAG | TCTGCCATGACGTGCTCA | 13 | 10 |
| 2GTOC | CACGTGA | GTCTG | | |
| HEK3_4A_ | GGCCCAGACTGAG | TCTGCCATAACGTGCTCA | 13 | 10 |
| 2GTOT | CACGTGA | GTCTG | | |
| HEK3_4A_ | GGCCCAGACTGAG | TCTGCCAGCACGTGCTCA | 13 | 10 |
| 3ATOC | CACGTGA | GTCTG | | |
| HEK3_4A_ | GGCCCAGACTGAG | TCTGCCACCACGTGCTCA | 13 | 10 |
| 3ATOG | CACGTGA | GTCTG | | |
| HEK3_4A_ | GGCCCAGACTGAG | TCTGCCAACACGTGCTCA | 13 | 10 |
| 3ATOT | CACGTGA | GTCTG | | |
| HEK3_4A_ | GGCCCAGACTGAG | TCTGCCTTCACGTGCTCA | 13 | 10 |
| 4TTOA | CACGTGA | GTCTG | | |
| HEK3_4A_ | GGCCCAGACTGAG | TCTGCCGTCACGTGCTCA | 13 | 10 |
| 4TTOC | CACGTGA | GTCTG | | |
| HEK3_4A_ | GGCCCAGACTGAG | TCTGCCCTCACGTGCTCA | 13 | 10 |
| 4TTOG | CACGTGA | GTCTG | | |
| HEK3_4A_ | GGCCCAGACTGAG | TCTGCTATCACGTGCTCA | 13 | 10 |
| 5GTOA | CACGTGA | GTCTG | | |
| HEK3_4A_ | GGCCCAGACTGAG | TCTGCGATCACGTGCTCA | 13 | 10 |
| 5GTOC | CACGTGA | GTCTG | | |
| HEK3_4A_ | GGCCCAGACTGAG | TCTGCAATCACGTGCTCA | 13 | 10 |
| 5GTOT | CACGTGA | GTCTG | | |
| HEK3_4A_ | GGCCCAGACTGAG | TCTGTCATCACGTGCTCA | 13 | 10 |
| 6GTOA | CACGTGA | GTCTG | | |
| HEK3_4A_ | GGCCCAGACTGAG | TCTGGCATCACGTGCTCA | 13 | 10 |
| 6GTOC | CACGTGA | GTCTG | | |
| HEK3_4A_ | GGCCCAGACTGAG | TCTGACATCACGTGCTCA | 13 | 10 |
| 6GTOT | CACGTGA | GTCTG | | |
| HEK3_4A_ | GGCCCAGACTGAG | TCTTCCATCACGTGCTCA | 13 | 10 |
| 7CTOA | CACGTGA | GTCTG | | |
| HEK3_4A_ | GGCCCAGACTGAG | TCTCCCATCACGTGCTCA | 13 | 10 |
| 7CTOG | CACGTGA | GTCTG | | |
| HEK3_4A_ | GGCCCAGACTGAG | TCTACCATCACGTGCTCA | 13 | 10 |
| 7CTOT | CACGTGA | GTCTG | | |
| HEK3_4A_ | GGCCCAGACTGAG | TCGGCCATCACGTGCTCA | 13 | 10 |
| 8ATOC | CACGTGA | GTCTG | | |
| HEK3_4A_ | GGCCCAGACTGAG | TCCGCCATCACGTGCTCA | 13 | 10 |
| 8ATOG | CACGTGA | GTCTG | | |
| HEK3_4A_ | GGCCCAGACTGAG | TCAGCCATCACGTGCTCA | 13 | 10 |
| 8ATOT | CACGTGA | GTCTG | | |
| HEK3_4B_ | GGCCCAGACTGAG | TGGAGGAAGCAGGGCTT | 13 | 34 |
| 1TTOA | CACGTGA | CCTTTCCTCTGCCATCTC | | |
| | | GTGCTCAGTCTG | | |
| HEK3_4B_ | GGCCCAGACTGAG | TGGAGGAAGCAGGGCTT | 13 | 34 |
| 12GTOC | CACGTGA | CCTTTGCTCTGCCATCAC | | |
| | | GTGCTCAGTCTG | | |
| HEK3_4B_ | GGCCCAGACTGAG | TGGAGGAAGCAGGGCTT | 13 | 34 |
| 14ATOT | CACGTGA | CCTATCCTCTGCCATCAC | | |
| | | GTGCTCAGTCTG | | |
| HEK3_4B_ | GGCCCAGACTGAG | TGGAGGAAGCAGGGGTT | 13 | 34 |
| 17GTOC | CACGTGA | GCTTTCCTCTGCCATCAC | | |
| | | GTGCTCAGTCTG | | |
| HEK3_4B_ | GGCCCAGACTGAG | TGGAGGAAGCACGGCTT | 13 | 34 |
| 20GTOC | CACGTGA | CCTTTCCTCTGCCATCAC | | |
| | | GTGCTCAGTCTG | | |
| HEK3_4B_ | GGCCCAGACTGAG | TGGAGGAAGCTGGGCTT | 13 | 34 |
| 23CTOG | CACGTGA | CCTTTCCTCTGCCATCAC | | |
| | | GTGCTCAGTCTG | | |
| HEK3_4B_ | GGCCCAGACTGAG | TGGAGGAACCAGGGCTT | 13 | 34 |
| 24TTOA | CACGTGA | CCTTTCCTCTGCCATCAC | | |
| | | GTGCTCAGTCTG | | |
| HEK3_4B_ | GGCCCAGACTGAG | TGGACGAAGCAGGGCTT | 13 | 34 |
| 26CTOG | CACGTGA | CCTTTCCTCTGCCATCAC | | |
| | | GTGCTCAGTCTG | | |
| HEK3_4B_ | GGCCCAGACTGAG | TCGAGGAAGCAGGGCTT | 13 | 34 |
| 30CTOG | CACGTGA | CCTTTCCTCTGCCATCAC | | |
| | | GTGCTCAGTCTG | | |
| HEK3_4B_ | GGCCCAGACTGAG | TCGAGGAAGCAGGGCTT | 13 | 34 |
| 33CTOG | CACGTGA | CCTTTCCTCTGCCATCAC | | |
| | | GTGCTCAGTCTG | | |
| RNF2_4C_ | GTCATCTTAGTCATT | AACGAACACCTCATGTAA | 15 | 14 |
| 1CTOA | ACCTG | TGACTAAGATG | | |
| RNF2_4C_ | GTCATCTTAGTCATT | AACGAACACCTCACGTA | 15 | 14 |
| 1CTOG | ACCTG | ATGACTAAGATG | | |
| RNF2_4C_ | GTCATCTTAGTCATT | AACGAACACCTCAAGTA | 15 | 14 |
| 1CTOT | ACCTG | ATGACTAAGATG | | |
| RNF2_4C_ | GTCATCTTAGTCATT | AACGAACACCTCTGGTA | 15 | 14 |
| 2TTOA | ACCTG | ATGACTAAGATG | | |
| RNF2_4C_ | GTCATCTTAGTCATT | AACGAACACCTCCGGTA | 15 | 14 |
| 2TTOG | ACCTG | ATGACTAAGATG | | |
| RNF2_4C_ | GTCATCTTAGTCATT | AACGAACACCTGAGGTA | 15 | 14 |
| 3GTOC | ACCTG | ATGACTAAGATG | | |
| RNF2_4C_ | GTCATCTTAGTCATT | AACGAACACCGCAGGTA | 15 | 14 |
| 4ATOC | ACCTG | ATGACTAAGATG | | |
| RNF2_4C_ | GTCATCTTAGTCATT | AACGAACACCACAGGTA | 15 | 14 |
| 4ATOT | ACCTG | ATGACTAAGATG | | |
| RNF2_4C_ | GTCATCTTAGTCATT | AACGAACACCCCAGGTA | 15 | 14 |
| 4ATOG | ACCTG | ATGACTAAGATG | | |
| RNF2_4C_ | GTCATCTTAGTCATT | AACGAACACATCAGGTA | 15 | 14 |
| 5GTOT | ACCTG | ATGACTAAGATG | | |
| RNF2_4C_ | GTCATCTTAGTCATT | AACGAACATCTCAGGTA | 15 | 14 |
| 6GTOA | ACCTG | ATGACTAAGATG | | |
| RNF2_4C_ | GTCATCTTAGTCATT | AACGAACGCCTCAGGTA | 15 | 14 |
| 7TTOC | ACCTG | ATGACTAAGATG | | |
| FANCF_4D_ | GGAATCCCTTCTGC | GGAAAAGCGATCCAGGC | 14 | 17 |
| lATOG | AGCACC | GCTGCAGAAGGGAT | | |
| FANCF_4D_ | GGAATCCCTTCTGC | GGAAAAGCGATCCAGGA | 14 | 17 |
| lATOT | AGCACC | GCTGCAGAAGGGAT | | |
| FANCF_4D_ | GGAATCCCTTCTGC | GGAAAAGCGATCCAGTT | 14 | 17 |
| 2CTOA | AGCACC | GCTGCAGAAGGGAT | | |
| FANCF_4D_ | GGAATCCCTTCTGC | GGAAAAGCGATCCACGT | 14 | 17 |
| 3CTOG | AGCACC | GCTGCAGAAGGGAT | | |
| FANCF_4D_ | GGAATCCCTTCTGC | GGAAAAGCGATCCAAGT | 14 | 17 |
| 3CTOT | AGCACC | GCTGCAGAAGGGAT | | |
| FANCF_4D_ | GGAATCCCTTCTGC | GGAAAAGCGATCCTGGT | 14 | 17 |
| 4TTOA | AGCACC | GCTGCAGAAGGGAT | | |
| FANCF_4D_ | GGAATCCCTTCTGC | GGAAAAGCGATCCCGGT | 14 | 17 |
| 4TTOG | AGCACC | GCTGCAGAAGGGAT | | |
| FANCF_4D_ | GGAATCCCTTCTGC | GGAAAAGCGATCTAGGT | 14 | 17 |
| 5GTOA | AGCACC | GCTGCAGAAGGGAT | | |
| FANCF_4D_ | GGAATCCCTTCTGC | GGAAAAGCGATGCAGGT | 14 | 17 |
| 6GTOC | AGCACC | GCTGCAGAAGGGAT | | |
| FANCF_4D_ | GGAATCCCTTCTGC | GGAAAAGCGAGCCAGGT | 14 | 17 |
| 7ATOC | AGCACC | GCTGCAGAAGGGAT | | |
| FANCF_4D_ | GGAATCCCTTCTGC | GGAAAAGCGGTCCAGGT | 14 | 17 |
| 8TTOC | AGCACC | GCTGCAGAAGGGAT | | |
| FANCF_4D_ | GGAATCCCTTCTGC | GGAAAAGAGATCCAGGT | 14 | 17 |
| 10GTOT | AGCACC | GCTGCAGAAGGGAT | | |
| EMX1_4E_ | GAGTCCGAGCAGA | GTGATGGGAGCCCTGCTT | 14 | 16 |
| 2ATOC | AGAAGAA | CTTCTGCTCGGA | | |
| EMX1_4E_ | GAGTCCGAGCAGA | GTGATGGGAGCCCTACTT | 14 | 16 |
| 2ATOT | AGAAGAA | CTTCTGCTCGGA | | |
| EMX1_4E_ | GAGTCCGAGCAGA | GTGATGGGAGCCCCTCTT | 14 | 16 |
| 3ATOG | AGAAGAA | CTTCTGCTCGGA | | |
| EMX1_4E_ | GAGTCCGAGCAGA | GTGATGGGAGCCGTTCTT | 14 | 16 |
| 4GTOC | AGAAGAA | CTTCTGCTCGGA | | |
| EMX1_4E_ | GAGTCCGAGCAGA | GTGATGGGAGCTCTTCTT | 14 | 16 |
| 5GTOA | AGAAGAA | CTTCTGCTCGGA | | |
| EMX1_4E_ | GAGTCCGAGCAGA | GTGATGGGAGCACTTCTT | 14 | 16 |
| 5GTOT | AGAAGAA | CTTCTGCTCGGA | | |
| EMX1_4E_ | GAGTCCGAGCAGA | GTGATGGGATCCCTTCTT | 14 | 16 |
| 7CTOA | AGAAGAA | CTTCTGCTCGGA | | |
| EMX1_4E_ | GAGTCCGAGCAGA | GTGATGGGTGCCCTTCTT | 14 | 16 |
| 8TTOA | AGAAGAA | CTTCTGCTCGGA | | |
| EMX1_4E_ | GAGTCCGAGCAGA | GTGATGGGGGCCCTTCTT | 14 | 16 |
| 8TTOC | AGAAGAA | CTTCTGCTCGGA | | |
| EMX1_4E_ | GAGTCCGAGCAGA | GTGATGGGCGCCCTTCTT | 14 | 16 |
| 8TTOG | AGAAGAA | CTTCTGCTCGGA | | |
| EMX1_4E_ | GAGTCCGAGCAGA | GTGATGGCAGCCCTTCTT | 14 | 16 |
| 9CTOG | AGAAGAA | CTTCTGCTCGGA | | |
| EMX1_4E_ | GAGTCCGAGCAGA | GTGATGGAAGCCCTTCTT | 14 | 16 |
| 9CTOT | AGAAGAA | CTTCTGCTCGGA | | |
| RUNX1_4F_ | GCATTTTCAGGAGG | TGTCTGAAGCCATCTCTT | 15 | 15 |
| 1CTOA | AAGCGA | CCTCCTGAAAAT | | |
| RUNX1_4F_ | GCATTTTCAGGAGG | TGTCTGAAGCCATCCCTT | 15 | 15 |
| 1CTOG | AAGCGA | CCTCCTGAAAAT | | |
| RUNX1_4F_ | GCATTTTCAGGAGG | TGTCTGAAGCCATCACTT | 15 | 15 |
| 1CTOT | AAGCGA | CCTCCTGAAAAT | | |
| RUNX1_4F_ | GCATTTTCAGGAGG | TGTCTGAAGCCATTGCTT | 15 | 15 |
| 2GTOA | AAGCGA | CCTCCTGAAAAT | | |
| RUNX1_4F_ | GCATTTTCAGGAGG | TGTCTGAAGCCAGCGCTT | 15 | 15 |
| 3ATOC | AAGCGA | CCTCCTGAAAAT | | |
| RUNX1_4F_ | GCATTTTCAGGAGG | TGTCTGAAGCCACCGCTT | 15 | 15 |
| 3ATOG | AAGCGA | CCTCCTGAAAAT | | |
| RUNX1_4F_ | GCATTTTCAGGAGG | TGTCTGAAGCCAACGCTT | 15 | 15 |
| 3ATOT | AAGCGA | CCTCCTGAAAAT | | |
| RUNX1_4F_ | GCATTTTCAGGAGG | TGTCTGAAGCCTTCGCTT | 15 | 15 |
| 4TTOA | AAGCGA | CCTCCTGAAAAT | | |
| RUNX1_4F_ | GCATTTTCAGGAGG | TGTCTGAAGCCGTCGCTT | 15 | 15 |
| 4TTOC | AAGCGA | CCTCCTGAAAAT | | |
| RUNX1_4F_ | GCATTTTCAGGAGG | TGTCTGAAGCCCTCGCTT | 15 | 15 |
| 4TTOG | AAGCGA | CCTCCTGAAAAT | | |
| RUNX1_4F_ | GCATTTTCAGGAGG | TGTCTGAAGCAATCGCTT | 15 | 15 |
| 5GTOT | AAGCGA | CCTCCTGAAAAT | | |
| RUNX1_4F_ | GCATTTTCAGGAGG | TGTCTGAAGGCATCGCTT | 15 | 15 |
| 6GTOC | AAGCGA | CCTCCTGAAAAT | | |
| VEGFA_4G_ | GATGTCTGCAGGCC | AATGTGCCATCTGGAGCC | 13 | 22 |
| 1TTOA | AGATGA | CTCTTCTGGCCTGCAGA | | |
| VEGFA_4G_ | GATGTCTGCAGGCC | AATGTGCCATCTGGAGCC | 13 | 22 |
| 1TTOC | AGATGA | CTCGTCTGGCCTGCAGA | | |
| VEGFA_4G_ | GATGTCTGCAGGCC | AATGTGCCATCTGGAGCC | 13 | 22 |
| 1TTOG | AGATGA | CTCCTCTGGCCTGCAGA | | |
| VEGFA_4G_ | GATGTCTGCAGGCC | AATGTGCCATCTGGAGCC | 13 | 22 |
| 2GTOA | AGATGA | CTTATCTGGCCTGCAGA | | |
| VEGFA_4G_ | GATGTCTGCAGGCC | AATGTGCCATCTGGAGCC | 13 | 22 |
| 3ATOC | AGATGA | CGCATCTGGCCTGCAGA | | |
| VEGFA_4G_ | GATGTCTGCAGGCC | AATGTGCCATCTGGAGCC | 13 | 22 |
| 3ATOG | AGATGA | CCCATCTGGCCTGCAGA | | |
| VEGFA_4G_ | GATGTCTGCAGGCC | AATGTGCCATCTGGAGCC | 13 | 22 |
| 3ATOT | AGATGA | CACATCTGGCCTGCAGA | | |
| VEGFA_4G_ | GATGTCTGCAGGCC | AATGTGCCATCTGGAGCA | 13 | 22 |
| 5GTOT | AGATGA | CTCATCTGGCCTGCAGA | | |
| VEGFA_4G_ | GATGTCTGCAGGCC | AATGTGCCATCTGGAGGC | 13 | 22 |
| 6GTOC | AGATGA | CTCATCTGGCCTGCAGA | | |
| VEGFA_4G_ | GATGTCTGCAGGCC | AATGTGCCATCTGGATCC | 13 | 22 |
| 7CTOA | AGATGA | CTCATCTGGCCTGCAGA | | |
| VEGFA_4G_ | GATGTCTGCAGGCC | AATGTGCCATCTGGAACC | 13 | 22 |
| 7CTOT | AGATGA | CTCATCTGGCCTGCAGA | | |
| VEGFA_4G_ | GATGTCTGCAGGCC | AATGTGCCATCTGCAGCC | 13 | 22 |
| 9CTOG | AGATGA | CTCATCTGGCCTGCAGA | | |
| DNMT1_ | GATTCCTGGTGCCA | GTCACCCCTGGTTCTGGC | 13 | 11 |
| 4H_1ATOC | GAAACA | ACCAGG | | |
| DNMT1_ | GATTCCTGGTGCCA | GTCACCCCTGCTTCTGGC | 13 | 11 |
| 4H_1ATOG | GAAACA | ACCAGG | | |
| DNMT1_ | GATTCCTGGTGCCA | GTCACCCCTTTTTCTGGC | 13 | 11 |
| 4H_2CTOA | GAAACA | ACCAGG | | |
| DNMT1_ | GATTCCTGGTGCCA | GTCACCCCTCTTTCTGGC | 13 | 11 |
| 4H_2CTOG | GAAACA | ACCAGG | | |
| DNMT1_ | GATTCCTGGTGCCA | GTCACCCCTATTTCTGGC | 13 | 11 |
| 4H_2CTOT | GAAACA | ACCAGG | | |
| DNMT1_ | GATTCCTGGTGCCA | GTCACCCCAGTTTCTGGC | 13 | 11 |
| 4H_3ATOT | GAAACA | ACCAGG | | |
| DNMT1_ | GATTCCTGGTGCCA | GTCACCCTTGTTTCTGGC | 13 | 11 |
| 4H_4GTOA | GAAACA | ACCAGG | | |
| DNMT1_ | GATTCCTGGTGCCA | GTCACCACTGTTTCTGGC | 13 | 11 |
| 4H_5GTOT | GAAACA | ACCAGG | | |
| DNMT1_ | GATTCCTGGTGCCA | GTCACGCCTGTTTCTGGC | 13 | 11 |
| 4H_6GTOC | GAAACA | ACCAGG | | |
| DNMT1_ | GATTCCTGGTGCCA | GCCCTCCCGTCTCCCCTG | 13 | 19 |
| 4H_8TTOA | GAAACA | TTTCTGGCACCAGG | | |
| DNMT1_ | GATTCCTGGTGCCA | GCCCTCCCGTCGCCCCTG | 13 | 19 |
| 4H_8TTOC | GAAACA | TTTCTGGCACCAGG | | |
| DNMT1_ | GATTCCTGGTGCCA | GCCCTCCCGTCCCCCCTG | 13 | 19 |
| 4H_8TTOG | GAAACA | TTTCTGGCACCAGG | | |
| HEK3_4J_ | GGCCCAGACTGAG | TGGAGGAAGCAGGGCTT | 13 | 29 |
| DEL1-5 | CACGTGA | CCTTTCCTCTGCCGTGCT | | |
| | | CAGTCTG | | |
| HEK3_4J_ | GGCCCAGACTGAG | TGGAGGAAGCAGGGCTT | 13 | 24 |
| DEL1-10 | CACGTGA | CCTTTCCCGTGCTCAGTC | | |
| | | TG | | |
| HEK3_4J_ | GGCCCAGACTGAG | TGGAGGAAGCAGGGCTT | 13 | 19 |
| DEL1-15 | CACGTGA | CCCGTGCTCAGTCTG | | |
| HEK3_4J_ | GGCCCAGACTGAG | TGTCCTGCGACGCCCTCT | 13 | 26 |
| DEL1-25 | CACGTGA | GGAGGAAGCGTGCTCAG | | |
| | | TCTG | | |
| HEK3_4J_ | GGCCCAGACTGAG | TGTCCTGCGACGCCCTCT | 13 | 21 |
| DEL1-30 | CACGTGA | GGACGTGCTCAGTCTG | | |
| HEK3_4J | GGCCCAGACTGAG | AGTATCCCGGTGCAGGA | 13 | 20 |
| DEL1-80 | CACGTGA | GCTCGTGCTCAGTCTG | | |
| HEK3_4I_ | GGCCCAGACTGAG | TCTGCCATCATCGTGCTC | 13 | 11 |
| 1AINS | CACGTGA | AGTCTG | | |
| HEK3_4I_ | GGCCCAGACTGAG | TCTGCCATCAAAGCGTGC | 13 | 13 |
| 1CTTINS | CACGTGA | TCAGTCTG | | |
| HEK3_4I_ | GGCCCAGACTGAG | TCTGCCATCCGTGCTCAG | 13 | 9 |
| 1TDEL | CACGTGA | TCTG | | |
| HEK3_4I_ | GGCCCAGACTGAG | TGGAGGAAGCAGGGCTT | 13 | 31 |
| 1-3TGADEL | CACGTGA | CCTTTCCTCTGCCACGTG | | |
| | | CTCAGTCTG | | |
| RNF2_4I_ | GTCATCTTAGTCATT | AACGAACACCTCAGAGT | 15 | 15 |
| 1TINS | ACCTG | AATGACTAAGATG | | |
| RNF2_4I_ | GTCATCTTAGTCATT | AACGAACACCTCAGTAC | 15 | 17 |
| 1GTAINS | ACCTG | GTAATGACTAAGATG | | |
| RNF2_4I_ | GTCATCTTAGTCATT | AACGAACACCCAGGTAA | 15 | 13 |
| 4ADEL | ACCTG | TGACTAAGATG | | |
| RNF2_4I_ | GTCATCTTAGTCATT | AACGAACACAGGTAATG | 15 | 11 |
| 3-5GAGDEL | ACCTG | ACTAAGATG | | |
| FANCF_4I_ | GGAATCCCTTCTGC | GGAAAAGCGATCCAGGG | 14 | 18 |
| 3CINS | AGCACC | TGCTGCAGAAGGGAT | | |
| FANCF_4I_ | GGAATCCCTTCTGC | GGAAAAGCGATCCAATC | 14 | 20 |
| 4GATINS | AGCACC | GGTGCTGCAGAAGGGAT | | |
| FANCF_4I_ | GGAATCCCTTCTGC | GGAAAAGCGATCAGGTG | 14 | 16 |
| 6GDEL | AGCACC | CTGCAGAAGGGAT | | |
| FANCF_4I_ | GGAATCCCTTCTGC | GGAAAAGCGAAGGTGCT | 14 | 14 |
| 5-7GGADEL | AGCACC | GCAGAAGGGAT | | |
| EMX1_4I_ | GAGTCCGAGCAGA | GTGATGGGAGCACCTTCT | 14 | 17 |
| 6TINS | AGAAGAA | TCTTCTGCTCGGA | | |
| EMX1_4I_ | GAGTCCGAGCAGA | GTGATGGGAGCCCTTCGC | 14 | 19 |
| 1TGCINS | AGAAGAA | ATTCTTCTGCTCGGA | | |
| EMX1_4I_ | GAGTCCGAGCAGA | GTGATGGGAGCCTTCTTC | 14 | 15 |
| 5GDEL | AGAAGAA | TTCTGCTCGGA | | |
| EMX1_4I_ | GAGTCCGAGCAGA | GTGATGGGAGTTCTTCTT | 14 | 13 |
| 4-6GGGDEL | AGAAGAA | CTGCTCGGA | | |
| RUNX1_4I_ | GCATTTTCAGGAGG | TGTCTGAAGCCATCGGCT | 15 | 16 |
| 1CINS | AAGCGA | TCCTCCTGAAAAT | | |
| RUNX1_4I_ | GCATTTTCAGGAGG | TGTCTGAAGCCATCCATG | 15 | 18 |
| 1ATGINS | AAGCGA | CTTCCTCCTGAAAAT | | |
| RUNX1_4I_ | GCATTTTCAGGAGG | TGTCTGAAGCCATGCTTC | 15 | 14 |
| 2GDEL | AAGCGA | CTCCTGAAAAT | | |
| RUNX1_4I_ | GCATTTTCAGGAGG | TGTCTGAAGCCGCTTCCT | 15 | 12 |
| 2-4GATDEL | AAGCGA | CCTGAAAAT | | |
| VEGFA_4I_ | GATGTCTGCAGGCC | AATGTGCCATCTGGAGCC | 13 | 23 |
| 4CINS | AGATGA | GCTCATCTGGCCTGCAGA | | |
| VEGFA_4I_ | GATGTCTGCAGGCC | AATGTGCCATCTGGAGCC | 13 | 25 |
| 2ACAINS | AGATGA | CTTGTCATCTGGCCTGCA | | |
| | | GA | | |
| VEGFA_4I_ | GATGTCTGCAGGCC | AATGTGCCATCTGGAGCC | 13 | 21 |
| 3ADEL | AGATGA | CCATCTGGCCTGCAGA | | |
| VEGFA_4I_ | GATGTCTGCAGGCC | AATGTGCCATCTGGAGCC | 13 | 19 |
| 2-4GAGDEL | AGATGA | ATCTGGCCTGCAGA | | |
| DNMT1_4I_ | GATTCCTGGTGCCA | TCCCGTCACCCGCTGTTT | 13 | 16 |
| 4CINS | GAAACA | CTGGCACCAGG | | |
| DNMT1_4I_ | GATTCCTGGTGCCA | TCCCGTCACCCCTGTGAT | 13 | 18 |
| 1TCAINS | GAAACA | TTCTGGCACCAGG | | |
| DNMT1_4I_ | GATTCCTGGTGCCA | TCCCGTCACCCCGTTTCT | 13 | 14 |
| 3ADEL | GAAACA | GGCACCAGG | | |
| DNMT1_4I_ | GATTCCTGGTGCCA | TCCCGTCACCGTTTCTGG | 13 | 12 |
| 3-5AGGDEL | GAAACA | CACCAGG | | |
| HEK3_4K_ | GGCCCAGACTGAG | TGGAGGAAGCAGGGCTT | 13 | 36 |
| 1CTTINS_ | CACGTGA | CCTTTCCTCTGCATCAAA | | |
| 5GDEL | | GCGTGCTCAGTCTG | | |
| HEK3_4K_ | GGCCCAGACTGAG | TGGAGGAAGCAGGGCTT | 13 | 37 |
| 1CTTINS_ | CACGTGA | CCTTTCCTCTGCCATGAA | | |
| 2GTOC | | AGCGTGCTCAGTCTG | | |
| HEK3_4K_ | GGCCCAGACTGAG | TGGAGGAAGCAGGGCTT | 13 | 33 |
| 3TDEL_ | CACGTGA | CCTTTCCTCTGCGATCCG | | |
| 5GTOC | | TGCTCAGTCTG | | |
| HEK3_4K_ | GGCCCAGACTGAG | TGGAGGAAGCAGGGCTT | 13 | 34 |
| 3GTOC_ | CACGTGA | CCTTTCCTCTGACATGAC | | |
| 6GTOT | | GTGCTCAGTCTG | | |
| RNF2_4K_ | GTCATCTTAGTCATT | AACGAACACCATTGGTA | 15 | 14 |
| 2AAINS_3- | ACCTG | ATGACTAAGATG | | |
| 4GADEL | | | | |
| RNF2_4K_ | GTCATCTTAGTCATT | AACGAACACGTCAGTGT | 15 | 15 |
| 1AINS_ | ACCTG | AATGACTAAGATG | | |
| 5GTOC | | | | |
| RNF2_4K_ | GTCATCTTAGTCATT | AACGAACAACTCGTAAT | 15 | 12 |
| 1-2CTDEL_ | ACCTG | GACTAAGATG | | |
| 6GTOT | | | | |
| RNF2_4K_ | GTCATCTTAGTCATT | AACGAACACATCATGTAA | 15 | 14 |
| 1CTOA_ | ACCTG | TGACTAAGATG | | |
| 5GTOT | | | | |
| FANCF_4K_ | GGAATCCCTTCTGC | GGAAAAGCGATCGGTAG | 14 | 16 |
| 1TINS_ | AGCACC | CTGCAGAAGGGAT | | |
| 3-4TGDEL | | | | |
| FANCF_4K_ | GGAATCCCTTCTGC | GGAAAAGCGATTCAGGT | 14 | 18 |
| 1TINS_ | AGCACC | AGCTGCAGAAGGGAT | | |
| 6GTOA | | | | |
| FANCF_4K_ | GGAATCCCTTCTGC | GGAAAAGCGATCAAGTG | 14 | 16 |
| 2CDEL_ | AGCACC | CTGCAGAAGGGAT | | |
| 5GTOT | | | | |

TABLE 3E
FIGS. 41A-41K nicking sgRNA

| | SPACER SEQUENCE |
|---|---|
| NICKING SGRNA | (SEQ ID NOS: 3456-3463) |
| HEK3_4A_+90 | GTCAACCAGTATCCCGGTGC |
| HEK3_4B_+90 | GTCAACCAGTATCCCGGTGC |
| RNF2_4C_+41 | GTCAACCATTAAGCAAAACAT |
| FANCF_4D_+48 | GGGGTCCCAGGTGCTGACGT |
| EMX1_4E_+53 | GACATCGATGTCCTCCCCAT |
| RUNX1_4F_+38 | GATGAAGCACTGTGGGTACGA |
| VEGFA_4G_+57 | GATGTACAGAGAGCCCAGGGC |
| DNMT1_4H_+49 | GCCCTTCAGCTAAAATAAAGG |

TABLE 3F
FIGS. 42A-42H PEgRNA

| | | | | RT |
|---|---|---|---|---|
| | SPACER SEQUENCE | | PBS | TEMPLATE |
| | (SEQ ID NO: | 3′ EXTENSION (SEQ ID | LENGTH | LENGTH |
| PEGRNA | 3464-3478) | NOS: 3479-3493) | (NT) | (NT) |
| HEK3_5A_ | GGCCCAGACTGA | TCTGTCATCACGTGCTCAGT | 13 | 10 |
| C3 | GCACGTGA | CTG | | |
| HEK3_5A_ | GGCCCAGACTGA | TCTGCTATCACGTGCTCAGT | 13 | 10 |
| C4 | GCACGTGA | CTG | | |
| HEK3_5A_ | GGCCCAGACTGA | TCTGCCATTACGTGCTCAGT | 13 | 10 |
| C7 | GCACGTGA | CTG | | |
| FANCF_5A_ | GGAATCCCTTCTG | GGAAAAGTGATCCAGGTGC | 14 | 17 |
| C3 | CAGCACC | TGCAGAAGGGAT | | |
| FANCF_5A_ | GGAATCCCTTCTG | GGAAAAGCGATTCAGGTGC | 14 | 17 |
| C7 | CAGCACC | TGCAGAAGGGAT | | |
| FANCF_5A_ | GGAATCCCTTCTG | GGAAAAGCGATCTAGGTGC | 14 | 17 |
| C8 | CAGCACC | TGCAGAAGGGAT | | |
| EMX1_5A_ | GAGTCCGAGCAG | GTGATGGGAGTCCTTCTTCT | 14 | 16 |
| C5 | AAGAAGAA | TCTGCTCGGA | | |
| EMX1_5A_ | GAGTCCGAGCAG | GTGATGGGAGCTCTTCTTCT | 14 | 16 |
| C6 | AAGAAGAA | TCTGCTCGGA | | |
| EMX1_5A_ | GAGTCCGAGCAG | GTGATGGGAGCCTTTCTTCT | 14 | 16 |
| C7 | AAGAAGAA | TCTGCTCGGA | | |
| EMX1_5C_ | GAGTCCGAGCAG | GTGATGGGAGTTCTTCTTCT | 14 | 16 |
| C5_6 | AAGAAGAA | TCTGCTCGGA | | |
| EMX1_5C_ | GAGTCCGAGCAG | GTGATGGGAGTCTTTCTTCT | 14 | 16 |
| C5_7 | AAGAAGAA | TCTGCTCGGA | | |
| EMX1_5C_ | GAGTCCGAGCAG | GTGATGGGAGCTTTTCTTCT | 14 | 16 |
| C6_7 | AAGAAGAA | TCTGCTCGGA | | |
| EMX1_5C_ | GAGTCCGAGCAG | GTGATGGGAGTTTTTCTTCT | 14 | 16 |
| C5_6_7 | AAGAAGAA | TCTGCTCGGA | | |
| HEK3_5D_ | GGCCCAGACTGA | TCTGCCGTCACGTGCTCAGT | 13 | 10 |
| A5 | GCACGTGA | CTG | | |
| HEK3_5D_ | GGCCCAGACTGA | TCTGCCATCGCGTGCTCAGT | 13 | 10 |
| A8 | GCACGTGA | CTG | | |

TABLE 3G
FIGS. 42A-42H nicking sgRNA

| | | POSSIBLE SPACER |
|---|---|---|
| | POSSIBLE SPACER SEQUENCE | SEQUENCE (SEQ ID NOS: |
| NICKING SGRNA | (SEQ ID NOS: 616-618) | 619-621) |
| HEK3_5A-F_+90 | GTCAACCAGTATCCCGGTGC | GTCAACCAGTATCCCGGTGC |
| FANCF_5A-F_+48 | GGGGTCCCAGGTGCTGACGT | GATGTACAGAGAGCCCAGGGC |
| EMX1_5A-F_+57 | GATGTACAGAGAGCCCAGGGC | GGGGTCCCAGGTGCTGACGT |

TABLE 3H
FIGS. 42A-42H base editing sgRNA

| BASE EDITING SGRNA | SPACER SEQUENCE |
|---|---|
| HEK3_5A-F_BE | GTGCCATCACGTGCTCAGTCT |
| | (SEQ ID NO: 455) |
| FANCF_5A-F_BE | GAGCGATCCAGGTGCTGCAGA |
| | (SEQ ID NO: 456) |
| EMX1_5A-F_BE | GGAGCCCTTCTTCTTCTGCT |
| | (SEQ ID NO: 457) |

TABLE 3I
FIGS. 42A-42H on-target sgRNA

| ON-TARGET SGRNA | SPACER SEQUENCE |
|---|---|
| HEK3_5G | GGCCCAGACTGAGCACGTGA |
| | (SEQ ID NO: 510) |
| HEK4_5G | GGCACTGCGGCTGGAGGTGG |
| | (SEQ ID NO: 511) |
| EMX1_5G | GAGTCCGAGCAGAAGAAGAA |
| | (SEQ ID NO: 512) |
| FANCF_5G | GGAATCCCTTCTGCAGCACC |
| | (SEQ ID NO: 513) |

TABLE 3J
FIGS. 42A-42H on-target PEgRNA

| | | | | RT |
|---|---|---|---|---|
| | | | PBS | TEMPLATE |
| ON-TARGET | SPACER SEQUENCE | 3′ EXTENSION (SEQ ID | LENGTH | LENGTH |
| PEGRNA | (SEQ ID NO: 663-677) | NO: 678-692) | (NT) | (NT) |
| HEK3_5G- | GGCCCAGACTGAGC | TCTGCCATCTCGTGCTCA | 13 | 10 |
| H_PEGRNA_1 | ACGTGA | GTCTG | | |
| HEK3_5G- | GGCCCAGACTGAGC | TCTGCCATCAAAGCGTG | 13 | 13 |
| H_PEGRNA_2 | ACGTGA | CTCAGTCTG | | |
| HEK3_5G- | GGCCCAGACTGAGC | TCTGCCATCCGTGCTCA | 13 | 9 |
| H_PEGRNA_3 | ACGTGA | GTCTG | | |
| HEK3_5G- | GGCCCAGACTGAGC | TCTGCGATCACGTGCTC | 13 | 10 |
| H_PEGRNA_4 | ACGTGA | AGTCTG | | |
| HEK4_5G- | GGCACTGCGGCTGG | TTAACGCCCACCTCCAG | 9 | 10 |
| H_PEGRNA_1 | AGGTGG | CC | | |
| HEK4_5G- | GGCACTGCGGCTGG | TTAACCCCCCCCTCCAG | 9 | 10 |
| H_PEGRNA_2 | AGGTGG | CC | | |
| HEK4_5G- | GGCACTGCGGCTGG | TTAACCCCTTACACCTCC | 9 | 13 |
| H_PEGRNA_3 | AGGTGG | AGCC | | |
| HEK4_5G- | GGCACTGCGGCTGG | TTAACCCCCCCTCCAGCC | 9 | 9 |
| H_PEGRNA_4 | AGGTGG | | | |
| EMX1_5G- | GAGTCCGAGCAGAA | GTGATGGGAGCACTTCT | 14 | 16 |
| H_PEGRNA_1 | GAAGAA | TCTTCTGCTCGGA | | |
| EMX1_5G- | GAGTCCGAGCAGAA | GTGATGGGAGCCCTGCT | 14 | 16 |
| H_PEGRNA_2 | GAAGAA | TCTTCTGCTCGGA | | |
| EMX1_5G- | GAGTCCGAGCAGAA | GTGATGGGAGCCCTTCG | 14 | 19 |
| H_PEGRNA_3 | GAAGAA | CATTCTTCTGCTCGGA | | |
| EMX1_5G- | GAGTCCGAGCAGAA | GTGATGGGAGTTCTTCTT | 14 | 13 |
| H_PEGRNA 4 | GAAGAA | CTGCTCGGA | | |
| FANCF_5G- | GGAATCCCTTCTGCA | GGAAAAGCGATGCAGGT | 14 | 17 |
| H_PEGRNA_1 | GCACC | GCTGCAGAAGGGAT | | |
| FANCF_5G- | GGAATCCCTTCTGCA | GGAAAAGCGATCCAGGC | 14 | 17 |
| H_PEGRNA_2 | GCACC | GCTGCAGAAGGGAT | | |
| FANCF_5G- | GGAATCCCTTCTGCA | GGAAAAGCGATCCAATC | 14 | 20 |
| H_PEGRNA 3 | GCACC | GGTGCTGCAGAAGGGAT | | |

TABLE 3K
FIGS. 49A-49BPEgRNA

| | | | | RT |
|---|---|---|---|---|
| | | | PBS | TEMPLATE |
| | SPACER SEQUENCE | 3′ EXTENSION | LENGTH | LENGTH |
| PEGRNA | (SEQ ID NO: 3494-3521) | (SEQ ID NO: 3522-3540) | (NT) | (NT) |
| HEK3_6A_ | GGCCCAGACTG | TCTGCCATGACGTGCTC | 13 | 10 |
| 2GTOC | AGCACGTGA | AGTCTG | | |
| HEK3_6A_ | GGCCCAGACTG | | | |
| 2GTOC | AGCACGTGA | | | |
| EMX1_6A_ | GAGTCCGAGCA | ATGGGAGCCCTTGTTCT | 13 | 13 |
| 3GTOC | GAAGAAGAA | TCTGCTCGG | | |
| EMX1_6A_ | GAGTCCGAGCA | | | |
| 3GTOC | GAAGAAGAA | | | |
| FANCF_6A_ | GGAATCCCTTCT | AAAAGCGATCAAGGTGC | 13 | 15 |
| 5GTOT | GCAGCACC | TGCAGAAGGGA | | |
| FANCF_6A_ | GGAATCCCTTCT | | | |
| 5GTOT | GCAGCACC | | | |
| HEK3_6A_ | GGCCCAGACTG | TGGAGGAAGCAGGGCTT | 13 | 52 |
| 1HIS6INS | AGCACGTGA | CCTTTCCTCTGCCATCAA | | |
| | | TGATGGTGATGATGGTG | | |
| | | CGTGCTCAGTCTG | | |
| HEK3_6A_ | GGCCCAGACTG | | | |
| 1HIS6INS | AGCACGTGA | | | |
| HEK3_6A_ | GGCCCAGACTG | TCTGCAATCACGTGCTC | 13 | 10 |
| 5GTOT | AGCACGTGA | AGTCTG | | |
| HEK3_6A_ | GGCCCAGACTG | | | |
| 5GTOT | AGCACGTGA | | | |
| HEK3_6A_ | GGCCCAGACTG | TCTGCCATCAAAGCGTG | 13 | 10 |
| 1CTTINS | AGCACGTGA | CTCAGTCTG | | |
| HEK3_6A_ | GGCCCAGACTG | | | |
| 1CTTINS | AGCACGTGA | | | |
| HBB_6B_ | GCATGGTGCAC | AGACTTCTCCACAGGAG | 13 | 14 |
| INSALL | CTGACTCCTG | TCAGGTGCAC | | |
| HBB_6B_ | GCATGGTGCAC | | | |
| INSALL | CTGACTCCTG | | | |
| HBB_6B_ | GCATGGTGCAC | AGACTTCTCCTCAGGAG | 13 | 14 |
| CORRECT | CTGACTCCTG | TCAGGTGCAC | | |
| HBB_6B_ | GCATGGTGCAC | | | |
| CORRECT | CTGACTCCTG | | | |
| HBB_6B_ | GCATGGTGCAC | AGACTTCTCTTCAGGAG | 13 | 14 |
| CORRECT_W_ | CTGACTCCTG | TCAGGTGCAC | | |
| SILENT | | | | |
| HBB_6B_ | GCATGGTGCAC | | | |
| CORRECT_W_ | CTGACTCCTG | | | |
| SILENT | | | | |
| HEXA_6B_ | GTACCTGAACC | AGTCAGGGCCATAGGAT | 12 | 14 |
| INSTALL | GTATATCCTA | AGATATACGGTTC | | |
| HEXA_6B_ | GATCCTTCCAGT | ACCTGAACCGTATATCCT | 10 | 21 |
| CORRECT | CAGGGCCAT | ATGGCCCTGACTG | | |
| HEXA_6B_ | GATCCTTCCAGT | GTACCTGAACCGTATATC | 9 | 27 |
| CORRECT_W_ | CAGGGCCAT | TTATGGCCCTGACT | | |
| SILENT | | | | |
| PRNP_6C | GCAGTGGTGGG | ATGTAGACGCCAAGGCC | 12 | 12 |
| | GGGCCTTGG | CCCCACC | | |
| HEK3_6E- | GGCCCAGACTG | TCTGCCATCCCGTGCTC | 13 | 10 |
| G_1TTOG | AGCACGTGA | AGTCTG | | |
| HEK3_6E- | GGCCCAGACTG | TCTGCCATCAAAGCGTG | 13 | 10 |
| G_1CTTINS | AGCACGTGA | CTCAGTCTG | | |
| RNF2_6E- | GTCATCTTAGTC | AACGAACACCTCACGTA | 15 | 14 |
| G_1CTOG | ATTACCTG | ATGACTAAGATG | | |
| HBB_6E- | GCATGGTGCAC | AGACTTCTCCACAGGAG | 13 | 14 |
| G_4ATOT | CTGACTCCTG | TCAGGTGCAC | | |
| HEK3_6H_ | GGCCCAGACTG | TGGAGGAAGCAGGGCTT | 13 | 52 |
| 1HIS6INS | AGCACGTGA | CCTTTCCTCTGCCATCAA | | |
| | | TGATGGTGATGATGGTG | | |
| | | CGTGCTCAGTCTG | | |
| HEK3_6H_ | GGCCCAGACTG | TGGAGGAAGCAGGGCTT | 13 | 58 |
| 1FLAGINS | AGCACGTGA | CCTTTCCTCTGCCATCAC | | |
| | | TTATCGTCGTCATCCTTG | | |
| | | TAATCCGTGCTCAGTCTG | | |

TABLE 3L
FIGS. 47A-74D PEgRNA

| | | | | RT |
|---|---|---|---|---|
| | | 3′ EXTENSION | PBS | TEMPLATE |
| | SPACER SEQUENCE | SEQUENCE (SEQ ID | LENGTH | LENGTH |
| PEGRNA | (SEQ ID NO: 3541-3547) | NO: 3549-3556) | (NT) | (NT) |
| HEK3_ED4B_ | GGCCCAGACTGAGC | TCTGCCATCCGTGCTCAG | 13 | 9 |
| 1TDEL | ACGTGA | TCTG | | |
| HEK3_ED4B_ | GGCCCAGACTGAGC | TCTGCCATCATCGTGCTC | 13 | 11 |
| 1AINS | ACGTGA | AGTCTG | | |
| HEK3_ED4B_ | GGCCCAGACTGAGC | TCTGCCATCAAAGCGTGC | 13 | 13 |
| 1CTTINS | ACGTGA | TCAGTCTG | | |
| HEK3_ED4C_ | GGCCCAGACTGAGC | TCTGCCATGACGTGCTCA | 13 | 10 |
| 2GTOC | ACGTGA | GTCTG | | |
| HEK3_ED4D_ | GGCCCAGACTGAGC | TGGAGGAAGCAGGGCTT | 13 | 58 |
| 1FLAGINS | ACGTGA | CCTTTCCTCTGCCATCAC | | |
| | | TTATCGTCGTCATCCTTGT | | |
| | | AATCCGTGCTCAGTCTG | | |
| RNF2_ED4E_ | GTCATCTTAGTCATT | AACGAACACCTCATGTAA | 15 | 14 |
| 1CTOA | ACCTG | TGACTAAGATG | | |
| EMX1_ED4F_ | GAGTCCGAGCAGAA | ATGGGAGCCCTTGTTCTT | 13 | 13 |
| 1GTOC | GAAGAA | CTGCTCGG | | |
| HBB_ED4G_ | GTAACGGCAGACTT | ATCTGACTCCTGTGGAGA | 12 | 14 |
| 2TTOA | CTCCTC | AGTCTGCC | | |

TABLE 3M
FIGS. 48A-48C PEgRNA

| | | | | RT |
|---|---|---|---|---|
| | | | PBS | TEMPLATE |
| | SPACER SEQUENCE | 3′ EXTENSION SEQUENCE | LENGTH | LENGTH |
| PEGRNA | (SEQ ID NO: 3557-3627) | (SEQ ID NO: 3549-3556) | (NT) | (NT) |
| VEGFA_ | GATGTCTGCAGGC | CCCTCTGACAATGTGCCATC | 13 | 31 |
| ED5A_31 | CAGATGA | TGGAGCACTCATCTGGCCTG | | |
| | | CAGA | | |
| VEGFA_ | GATGTCTGCAGGC | CCTCTGACAATGTGCCATCT | 13 | 30 |
| ED5A_30 | CAGATGA | GGAGCACTCATCTGGCCTGC | | |
| | | AGA | | |
| VEGFA_ | GATGTCTGCAGGC | CTCTGACAATGTGCCATCTG | 13 | 29 |
| ED5A_29 | CAGATGA | GAGCACTCATCTGGCCTGCA | | |
| | | GA | | |
| VEGFA_ | GATGTCTGCAGGC | TCTGACAATGTGCCATCTGG | 13 | 28 |
| ED5A_28 | CAGATGA | AGCACTCATCTGGCCTGCAGA | | |
| VEGFA_ | GATGTCTGCAGGC | CTGACAATGTGCCATCTGGA | 13 | 27 |
| ED5A_27 | CAGATGA | GCACTCATCTGGCCTGCAGA | | |
| VEGFA_ | GATGTCTGCAGGC | TGACAATGTGCCATCTGGAG | 13 | 26 |
| ED5A_26 | CAGATGA | CACTCATCTGGCCTGCAGA | | |
| VEGFA_ | GATGTCTGCAGGC | GACAATGTGCCATCTGGAGC | 13 | 25 |
| ED5A_25 | CAGATGA | ACTCATCTGGCCTGCAGA | | |
| VEGFA_ | GATGTCTGCAGGC | ACAATGTGCCATCTGGAGCA | 13 | 24 |
| ED5A_24 | CAGATGA | CTCATCTGGCCTGCAGA | | |
| VEGFA_ | GATGTCTGCAGGC | CAATGTGCCATCTGGAGCAC | 13 | 23 |
| ED5A_23 | CAGATGA | TCATCTGGCCTGCAGA | | |
| VEGFA_ | GATGTCTGCAGGC | AATGTGCCATCTGGAGCACT | 13 | 22 |
| ED5A_22 | CAGATGA | CATCTGGCCTGCAGA | | |
| VEGFA_ | GATGTCTGCAGGC | ATGTGCCATCTGGAGCACTC | 13 | 21 |
| ED5A_21 | CAGATGA | ATCTGGCCTGCAGA | | |
| VEGFA_ | GATGTCTGCAGGC | TGTGCCATCTGGAGCACTCA | 13 | 20 |
| ED5A_20 | CAGATGA | TCTGGCCTGCAGA | | |
| VEGFA_ | GATGTCTGCAGGC | GTGCCATCTGGAGCACTCAT | 13 | 19 |
| ED5A_19 | CAGATGA | CTGGCCTGCAGA | | |
| VEGFA_ | GATGTCTGCAGGC | TGCCATCTGGAGCACTCATC | 13 | 18 |
| ED5A_18 | CAGATGA | TGGCCTGCAGA | | |
| VEGFA_ | GATGTCTGCAGGC | GCCATCTGGAGCACTCATCT | 13 | 17 |
| ED5A_17 | CAGATGA | GGCCTGCAGA | | |
| VEGFA_ | GATGTCTGCAGGC | CCATCTGGAGCACTCATCTG | 13 | 16 |
| ED5A_16 | CAGATGA | GCCTGCAGA | | |
| VEGFA_ | GATGTCTGCAGGC | CATCTGGAGCACTCATCTGG | 13 | 15 |
| ED5A_15 | CAGATGA | CCTGCAGA | | |
| VEGFA_ | GATGTCTGCAGGC | ATCTGGAGCACTCATCTGGC | 13 | 14 |
| ED5A_14 | CAGATGA | CTGCAGA | | |
| VEGFA_ | GATGTCTGCAGGC | TCTGGAGCACTCATCTGGCC | 13 | 13 |
| ED5A_13 | CAGATGA | TGCAGA | | |
| VEGFA_ | GATGTCTGCAGGC | CTGGAGCACTCATCTGGCCT | 13 | 12 |
| ED5A_12 | CAGATGA | GCAGA | | |
| VEGFA_ | GATGTCTGCAGGC | TGGAGCACTCATCTGGCCTG | 13 | 11 |
| ED5A_11 | CAGATGA | CAGA | | |
| VEGFA_ | GATGTCTGCAGGC | GGAGCACTCATCTGGCCTGC | 13 | 10 |
| ED5A_10 | CAGATGA | AGA | | |
| VEGFA_ | GATGTCTGCAGGC | GAGCACTCATCTGGCCTGCA | 13 | 9 |
| ED5A_9 | CAGATGA | GA | | |
| VEGFA_ | GATGTCTGCAGGC | AGCACTCATCTGGCCTGCAGA | 13 | 8 |
| ED5A_8 | CAGATGA | | | |
| DNMT1_ | GATTCCTGGTGCC | AGGACTAGTTCTGCCCTCCC | 13 | 31 |
| ED5B_31 | AGAAACA | GTCACCACTGTTTCTGGCAC | | |
| | | CAGG | | |
| DNMT1_ | GATTCCTGGTGCC | GGACTAGTTCTGCCCTCCCG | 13 | 30 |
| ED5B_30 | AGAAACA | TCACCACTGTTTCTGGCACC | | |
| | | AGG | | |
| DNMT1_ | GATTCCTGGTGCC | GACTAGTTCTGCCCTCCCGT | 13 | 29 |
| ED5B_29 | AGAAACA | CACCACTGTTTCTGGCACCA | | |
| | | GG | | |
| DNMT1_ | GATTCCTGGTGCC | ACTAGTTCTGCCCTCCCGTC | 13 | 28 |
| ED5B_28 | AGAAACA | ACCACTGTTTCTGGCACCAGG | | |
| DNMT1_ | GATTCCTGGTGCC | CTAGTTCTGCCCTCCCGTCA | 13 | 27 |
| ED5B_27 | AGAAACA | CCACTGTTTCTGGCACCAGG | | |
| DNMT1_ | GATTCCTGGTGCC | TAGTTCTGCCCTCCCGTCAC | 13 | 26 |
| ED5B_26 | AGAAACA | CACTGTTTCTGGCACCAGG | | |
| DNMT1_ | GATTCCTGGTGCC | AGTTCTGCCCTCCCGTCACC | 13 | 25 |
| ED5B_25 | AGAAACA | ACTGTTTCTGGCACCAGG | | |
| DNMT1_ | GATTCCTGGTGCC | GTTCTGCCCTCCCGTCACCA | 13 | 24 |
| ED5B_24 | AGAAACA | CTGTTTCTGGCACCAGG | | |
| DNMT1_ | GATTCCTGGTGCC | TTCTGCCCTCCCGTCACCAC | 13 | 23 |
| ED5B_23 | AGAAACA | TGTTTCTGGCACCAGG | | |
| DNMT1_ | GATTCCTGGTGCC | TCTGCCCTCCCGTCACCACT | 13 | 22 |
| ED5B_22 | AGAAACA | GTTTCTGGCACCAGG | | |
| DNMT1_ | GATTCCTGGTGCC | CTGCCCTCCCGTCACCACTG | 13 | 21 |
| ED5B_21 | AGAAACA | TTTCTGGCACCAGG | | |
| DNMT1_ | GATTCCTGGTGCC | TGCCCTCCCGTCACCACTGT | 13 | 20 |
| ED5B_20 | AGAAACA | TTCTGGCACCAGG | | |
| DNMT1_ | GATTCCTGGTGCC | GCCCTCCCGTCACCACTGTT | 13 | 19 |
| ED5B_19 | AGAAACA | TCTGGCACCAGG | | |
| DNMT1_ | GATTCCTGGTGCC | CCCTCCCGTCACCACTGTTT | 13 | 18 |
| ED5B_18 | AGAAACA | CTGGCACCAGG | | |
| DNMT1_ | GATTCCTGGTGCC | CCTCCCGTCACCACTGTTTC | 13 | 17 |
| ED5B_17 | AGAAACA | TGGCACCAGG | | |
| DNMT1_ | GATTCCTGGTGCC | CTCCCGTCACCACTGTTTCT | 13 | 16 |
| ED5B_16 | AGAAACA | GGCACCAGG | | |
| DNMT1_ | GATTCCTGGTGCC | TCCCGTCACCACTGTTTCTG | 13 | 15 |
| ED5B_15 | AGAAACA | GCACCAGG | | |
| DNMT1_ | GATTCCTGGTGCC | CCCGTCACCACTGTTTCTGG | 13 | 14 |
| ED5B_14 | AGAAACA | CACCAGG | | |
| DNMT1_ | GATTCCTGGTGCC | CCGTCACCACTGTTTCTGGC | 13 | 13 |
| ED5B_13 | AGAAACA | ACCAGG | | |
| DNMT1_ | GATTCCTGGTGCC | CGTCACCACTGTTTCTGGCA | 13 | 12 |
| ED5B_12 | AGAAACA | CCAGG | | |
| DNMT1_ | GATTCCTGGTGCC | GTCACCACTGTTTCTGGCAC | 13 | 11 |
| ED5B_11 | AGAAACA | CAGG | | |
| DNMT1_ | GATTCCTGGTGCC | TCACCACTGTTTCTGGCACC | 13 | 10 |
| ED5B_10 | AGAAACA | AGG | | |
| DNMT1_ | GATTCCTGGTGCC | CACCACTGTTTCTGGCACCA | 13 | 9 |
| ED5B_9 | AGAAACA | GG | | |
| DNMT1_ | GATTCCTGGTGCC | ACCACTGTTTCTGGCACCAGG | 13 | 8 |
| ED5B_8 | AGAAACA | | | |
| RUNX1_ | GCATTTTCAGGAG | AATGACTCAAATATGCTGTC | 15 | 31 |
| ED5C_31 | GAAGCGA | TGAAGCAATCGCTTCCTCCT | | |
| | | GAAAAT | | |
| RUNX1_ | GCATTTTCAGGAG | ATGACTCAAATATGCTGTCT | 15 | 30 |
| ED5C_30 | GAAGCGA | GAAGCAATCGCTTCCTCCTG | | |
| | | AAAAT | | |
| RUNX1_ | GCATTTTCAGGAG | TGACTCAAATATGCTGTCTG | 15 | 29 |
| ED5C_29 | GAAGCGA | AAGCAATCGCTTCCTCCTGA | | |
| | | AAAT | | |
| RUNX1_ | GCATTTTCAGGAG | GACTCAAATATGCTGTCTGA | 15 | 28 |
| ED5C_28 | GAAGCGA | AGCAATCGCTTCCTCCTGAA | | |
| | | AAT | | |
| RUNX1_ | GCATTTTCAGGAG | ACTCAAATATGCTGTCTGAA | 15 | 27 |
| ED5C_27 | GAAGCGA | GCAATCGCTTCCTCCTGAAA | | |
| | | AT | | |
| RUNX1_ | GCATTTTCAGGAG | CTCAAATATGCTGTCTGAAG | 15 | 26 |
| ED5C_26 | GAAGCGA | CAATCGCTTCCTCCTGAAAAT | | |
| RUNX1_ | GCATTTTCAGGAG | TCAAATATGCTGTCTGAAGC | 15 | 25 |
| ED5C_25 | GAAGCGA | AATCGCTTCCTCCTGAAAAT | | |
| RUNX1_ | GCATTTTCAGGAG | CAAATATGCTGTCTGAAGCA | 15 | 24 |
| ED5C_24 | GAAGCGA | ATCGCTTCCTCCTGAAAAT | | |
| RUNX1_ | GCATTTTCAGGAG | AAATATGCTGTCTGAAGCAA | 15 | 23 |
| ED5C_23 | GAAGCGA | TCGCTTCCTCCTGAAAAT | | |
| RUNX1_ | GCATTTTCAGGAG | AATATGCTGTCTGAAGCAAT | 15 | 22 |
| ED5C_22 | GAAGCGA | CGCTTCCTCCTGAAAAT | | |
| RUNX1_ | GCATTTTCAGGAG | ATATGCTGTCTGAAGCAATC | 15 | 21 |
| ED5C_21 | GAAGCGA | GCTTCCTCCTGAAAAT | | |
| RUNX1_ | GCATTTTCAGGAG | TATGCTGTCTGAAGCAATCG | 15 | 20 |
| ED5C_20 | GAAGCGA | CTTCCTCCTGAAAAT | | |
| RUNX1_ | GCATTTTCAGGAG | ATGCTGTCTGAAGCAATCGC | 15 | 19 |
| ED5C_19 | GAAGCGA | TTCCTCCTGAAAAT | | |
| RUNX1_ | GCATTTTCAGGAG | TGCTGTCTGAAGCAATCGCT | 15 | 18 |
| ED5C_18 | GAAGCGA | TCCTCCTGAAAAT | | |
| RUNX1_ | GCATTTTCAGGAG | GCTGTCTGAAGCAATCGCTT | 15 | 17 |
| ED5C_17 | GAAGCGA | CCTCCTGAAAAT | | |
| RUNX1_ | GCATTTTCAGGAG | CTGTCTGAAGCAATCGCTTC | 15 | 16 |
| ED5C_16 | GAAGCGA | CTCCTGAAAAT | | |
| RUNX1_ | GCATTTTCAGGAG | TGTCTGAAGCAATCGCTTCC | 15 | 15 |
| ED5C_15 | GAAGCGA | TCCTGAAAAT | | |
| RUNX1_ | GCATTTTCAGGAG | GTCTGAAGCAATCGCTTCCT | 15 | 14 |
| ED5C_14 | GAAGCGA | CCTGAAAAT | | |
| RUNX1_ | GCATTTTCAGGAG | TCTGAAGCAATCGCTTCCTC | 15 | 13 |
| ED5C_13 | GAAGCGA | CTGAAAAT | | |
| RUNX1_ | GCATTTTCAGGAG | CTGAAGCAATCGCTTCCTCC | 15 | 12 |
| ED5C_12 | GAAGCGA | TGAAAAT | | |
| RUNX1_ | GCATTTTCAGGAG | TGAAGCAATCGCTTCCTCCT | 15 | 11 |
| ED5C_11 | GAAGCGA | GAAAAT | | |
| RUNX1_ | GCATTTTCAGGAG | GAAGCAATCGCTTCCTCCTG | 15 | 10 |
| ED5C_10 | GAAGCGA | AAAAT | | |
| RUNX1_ | GCATTTTCAGGAG | AAGCAATCGCTTCCTCCTGA | 15 | 9 |
| ED5C_9 | GAAGCGA | AAAT | | |

TABLE 3N
FIGS. 48A-48C PEgRNA

| | | | PBS | RT TEMPLATE |
|---|---|---|---|---|
| | | 3′ EXTENSION | LENGTH | LENGTH |
| PEGRNA | SPACER SEQUENCE | SEQUENCE | (NT) | (NT) |
| HEK3_ED6_5 | GGCCCAGACTGAGC | TCTGCTATCACGTGCT | 13 | 10 |
| GTOA | ACGTGA (SEQ ID | CAGTCTG (SEQ ID NO: | | |
| | NO: 393) | 394) | | |

TABLE 3O
FIGS. 48A-48C nicking sgRNA

| NICKING SGRNA | SPACER SEQUENCE |
|---|---|
| HEK3_ED6_+63 | GCACATACTAGCCCCTGTCT |
| | (SEQ ID NO: 395) |

TABLE 3P
FIGS. 50A-50B PEgRNA

| | | | | RT |
|---|---|---|---|---|
| | | | PBS | TEMPLATE |
| PEG | SPACER (SEQ ID | 3′ EXTENSION (5′ TO 3′) | LENGTH | LENGTH |
| RNA | NO: 3699-3754) | (SEQ ID NO: 3755-3810) | (NT) | (NT) |
| HBB | GTAACGGCAGAC | AGACTTCTCCTCAGGAGTCAGGT | 12 | 14 |
| 3.5 | TTCTCCAC | GCAC | | |
| HBB | GCATGGTGCACCT | AGACTTCTCTTCAGGAGTCAGGT | 13 | 14 |
| 3.7 | GACTCCTG | GCAC | | |
| HBB | GCATGGTGCACCT | TAACGGCAGACTTCTCCTCAGGA | 13 | 19 |
| 5.2 | GACTCCTG | GTCAGGTGCAC | | |
| HBB | GCATGGTGCACCT | ACGGCAGACTTCTCCTCAGGAGT | 13 | 17 |
| 5.3 | GACTCCTG | CAGGTGCAC | | |
| HBB | GCATGGTGCACCT | GGCAGACTTCTCCTCAGGAGTCA | 13 | 16 |
| 5.4 | GACTCCTG | GGTGCAC | | |
| HBB | GCATGGTGCACCT | GCAGACTTCTCCTCAGGAGTCAG | 13 | 13 |
| 5.5 | GACTCCTG | GTGCAC | | |
| HBB | GCATGGTGCACCT | GACTTCTCCTCAGGAGTCAGGTG | 13 | 12 |
| 5.6 | GACTCCTG | CAC | | |
| HBB | GCATGGTGCACCT | ACTTCTCCTCAGGAGTCAGGTGC | 13 | 21 |
| 5.7 | GACTCCTG | AC | | |
| HBB | GCATGGTGCACCT | TAACGGCAGACTTCTCCTCAGGA | 12 | 19 |
| 5.8 | GACTCCTG | GTCAGGTGCA | | |
| HBB | GCATGGTGCACCT | ACGGCAGACTTCTCCTCAGGAGT | 12 | 17 |
| 5.9 | GACTCCTG | CAGGTGCA | | |
| HBB | GCATGGTGCACCT | GGCAGACTTCTCCTCAGGAGTCA | 12 | 16 |
| 5.10 | GACTCCTG | GGTGCA | | |
| HBB | GCATGGTGCACCT | GCAGACTTCTCCTCAGGAGTCAG | 12 | 13 |
| 5.11 | GACTCCTG | GTGCA | | |
| HBB | GCATGGTGCACCT | GACTTCTCCTCAGGAGTCAGGTG | 12 | 12 |
| 5.12 | GACTCCTG | CA | | |
| HBB | GCATGGTGCACCT | ACTTCTCCTCAGGAGTCAGGTGC | 12 | 14 |
| 5.13 | GACTCCTG | A | | |
| HEXAS | ATCCTTCCAGTCA | ATATCTTATGGCCCTGACTGGAA | 13 | 14 |
| 1 | GGGCCAT | | | |
| HEXAS | ATCCTTCCAGTCA | TATATCTTATGGCCCTGACTGGAA | 13 | 15 |
| 2 | GGGCCAT | | | |
| HEXAS | ATCCTTCCAGTCA | GTATATCTTATGGCCCTGACTGGA | 13 | 16 |
| 3 | GGGCCAT | A | | |
| HEXAS | ATCCTTCCAGTCA | ACCGTATATCTTATGGCCCTGACT | 13 | 19 |
| 4 | GGGCCAT | GGAA | | |
| HEXAS | ATCCTTCCAGTCA | AACCGTATATCTTATGGCCCTGAC | 13 | 20 |
| 5 | GGGCCAT | TGGAA | | |
| HEXAS | ATCCTTCCAGTCA | GAACCGTATATCTTATGGCCCTGA | 13 | 21 |
| 6 | GGGCCAT | CTGGAA | | |
| HEXAS | ATCCTTCCAGTCA | TGAACCGTATATCTTATGGCCCTG | 13 | 22 |
| 7 | GGGCCAT | ACTGGAA | | |
| HEXAS | ATCCTTCCAGTCA | ATATCTTATGGCCCTGACT | 9 | 14 |
| 8 | GGGCCAT | | | |
| HEXAS | ATCCTTCCAGTCA | TATATCTTATGGCCCTGACT | 9 | 15 |
| 9 | GGGCCAT | | | |
| HEXAS | ATCCTTCCAGTCA | GTATATCTTATGGCCCTGACT | 9 | 16 |
| 10 | GGGCCAT | | | |
| HEXAS | ATCCTTCCAGTCA | ACCGTATATCTTATGGCCCTGACT | 9 | 19 |
| 11 | GGGCCAT | | | |
| HEXAS | ATCCTTCCAGTCA | AACCGTATATCTTATGGCCCTGAC | 9 | 20 |
| 12 | GGGCCAT | T | | |
| HEXAS | ATCCTTCCAGTCA | GAACCGTATATCTTATGGCCCTGA | 9 | 21 |
| 13 | GGGCCAT | CT | | |
| HEXAS | ATCCTTCCAGTCA | TGAACCGTATATCTTATGGCCCTG | 9 | 22 |
| 14 | GGGCCAT | ACT | | |
| HEXAS | ATCCTTCCAGTCA | TGAACCGTATATCTTATGGCCCTG | 8 | 22 |
| 15 | GGGCCAT | AC | | |
| HEXAS | ATCCTTCCAGTCA | TGAACCGTATATCTTATGGCCCTG | 10 | 22 |
| 16 | GGGCCAT | ACTG | | |
| HEXAS | ATCCTTCCAGTCA | TGAACCGTATATCTTATGGCCCTG | 11 | 22 |
| 17 | GGGCCAT | ACTGG | | |
| HEXAS | ATCCTTCCAGTCA | TGAACCGTATATCTTATGGCCCTG | 12 | 22 |
| 18 | GGGCCAT | ACTGGA | | |
| HEXAS | ATCCTTCCAGTCA | TGAACCGTATATCTTATGGCCCTG | 13 | 22 |
| 19 | GGGCCAT | ACTGGAA | | |
| HEXAS | ATCCTTCCAGTCA | TGAACCGTATATCTTATGGCCCTG | 14 | 22 |
| 20 | GGGCCAT | ACTGGAAG | | |
| HEXAS | ATCCTTCCAGTCA | TGAACCGTATATCTTATGGCCCTG | 15 | 22 |
| 21 | GGGCCAT | ACTGGAAGG | | |
| HEXAS | ATCCTTCCAGTCA | ACCTGAACCGTATATCTTATGGCC | 9 | 25 |
| 22 | GGGCCAT | CTGACT | | |
| HEXAS | ATCCTTCCAGTCA | TACCTGAACCGTATATCTTATGGC | 9 | 26 |
| 23 | GGGCCAT | CCTGACT | | |
| HEXAS | ATCCTTCCAGTCA | GTACCTGAACCGTATATCTTATGG | 9 | 27 |
| 24 | GGGCCAT | CCCTGACT | | |
| HEXAS | ATCCTTCCAGTCA | GGTACCTGAACCGTATATCTTATG | 9 | 28 |
| 25 | GGGCCAT | GCCCTGACT | | |
| HEXAS | ATCCTTCCAGTCA | TGGTACCTGAACCGTATATCTTAT | 9 | 29 |
| 26 | GGGCCAT | GGCCCTGACT | | |
| HEXA | ATCCTTCCAGTCA | ACCTGAACCGTATATCCTATGGCC | 13 | 21 |
| 5 | GGGCCAT | CTGACTGGAA | | |
| HEXA | ATCCTTCCAGTCA | ACCGTATATCCTATGGCCCTGACT | 13 | 15 |
| 6 | GGGCCAT | GGAA | | |
| HEXA | ATCCTTCCAGTCA | ACCTGAACCGTATATCCTATGGCC | 15 | 21 |
| 7 | GGGCCAT | CTGACTGGAAGG | | |
| HEXA | ATCCTTCCAGTCA | ACCTGAACCGTATATCCTATGGCC | 14 | 21 |
| 8 | GGGCCAT | CTGACTGGAAG | | |
| HEXA | ATCCTTCCAGTCA | ACCTGAACCGTATATCCTATGGCC | 12 | 21 |
| 9 | GGGCCAT | CTGACTGGA | | |
| HEXA | ATCCTTCCAGTCA | ACCTGAACCGTATATCCTATGGCC | 11 | 21 |
| 10 | GGGCCAT | CTGACTGG | | |
| HEXA | ATCCTTCCAGTCA | ACCTGAACCGTATATCCTATGGCC | 10 | 21 |
| 11 | GGGCCAT | CTGACTG | | |
| HEXA | ATCCTTCCAGTCA | AACCGTATATCCTATGGCCCTGAC | 13 | 16 |
| 12 | GGGCCAT | TGGAA | | |
| HEXA | ATCCTTCCAGTCA | TGAACCGTATATCCTATGGCCCTG | 13 | 18 |
| 13 | GGGCCAT | ACTGGAA | | |
| HEXA | ATCCTTCCAGTCA | TACCTGAACCGTATATCCTATGGC | 13 | 22 |
| 14 | GGGCCAT | CCTGACTGGAA | | |
| HEXA | ATCCTTCCAGTCA | TGGTACCTGAACCGTATATCCTAT | 13 | 25 |
| 15 | GGGCCAT | GGCCCTGACTGGAA | | |
| HEXA | ATCCTTCCAGTCA | GTACCTGAACCGTATATCCTATGG | 13 | 23 |
| 16 | GGGCCAT | CCCTGACTGGAA | | |
| HEXA | ATCCTTCCAGTCA | AACCGTATATCCTATGGCCCTGAC | 10 | 16 |
| 17 | GGGCCAT | TG | | |
| HEXA | ATCCTTCCAGTCA | TGAACCGTATATCCTATGGCCCTG | 10 | 18 |
| 18 | GGGCCAT | ACTG | | |
| HEXA | ATCCTTCCAGTCA | TACCTGAACCGTATATCCTATGGC | 10 | 22 |
| 19 | GGGCCAT | CCTGACTG | | |
| HEXA | ATCCTTCCAGTCA | TGGTACCTGAACCGTATATCCTAT | 10 | 25 |
| 20 | GGGCCAT | GGCCCTGACTG | | |

TABLE 3Q
FIGS. 50A-50B nicking sgRNA

| NICKING SGRNA | SPACER SEQUENCE |
|---|---|
| HBB_ED7A_+72 | GCCTTGATACCAACCTGCCCA |
| | (SEQ ID NO: 626) |
| HEXA_ED7B_+60 | GCTGGAACTGGTCACCAAGGC |
| | (SEQ ID NO: 627) |
| HEXA_ED7B_CORRECT_WT_PE3B | GTACCTGAACCGTATATCCTA |
| | (SEQ ID NO: 628) |
| HEXA_ED7B_CORRECT_SILENT_PE3B | GTACCTGAACCGTATATCTTA |
| | (SEQ ID NO: 629) |

TABLE 3R
FIGS. 51A-51G PEgRNA

| | | | | RT |
|---|---|---|---|---|
| | | | PBS | TEMPLATE |
| | SPACER SEQUENCE | 3′ EXTENSION | LENGTH | LENGTH |
| PEGRNA | (SEQ ID NO: 632-640) | (SEQ ID NO: 641-649) | (NT) | (NT) |
| HEK3_ED8_1 | GGCCCAGACTGAGC | TCTGCCATCCCGTGCTCA | 13 | 10 |
| TTOG | ACGTGA | GTCTG | | |
| HEK3_ED8_3 | GGCCCAGACTGAGC | TCTGCCAGCACGTGCTCA | 13 | 10 |
| ATOC | ACGTGA | GTCTG | | |
| HEK3_ED8_3 | GGCCCAGACTGAGC | TCTGCCAACACGTGCTCA | 13 | 10 |
| ATOT | ACGTGA | GTCTG | | |
| HEK3_ED8_3 | GGCCCAGACTGAGC | TGGAGGAAGCAGGGCTTC | 13 | 34 |
| ATOT_5- | ACGTGA | CTTTCCTCTGAAAACACG | | |
| 6GGTOTT | | TGCTCAGTCTG | | |
| HEK3_ED8_1 | GGCCCAGACTGAGC | TCTGCCATCAAAGCGTGC | 13 | 10 |
| CTTINS | ACGTGA | TCAGTCTG | | |
| RNF2_ED8_1 | GTCATCTTAGTCATT | AACGAACACCTCATGTAA | 15 | 14 |
| CTOA | ACCTG | TGACTAAGATG | | |
| RNF2_ED8_1 | GTCATCTTAGTCATT | AACGAACACCTCACGTAA | 15 | 14 |
| CTOG | ACCTG | TGACTAAGATG | | |
| RNF2_ED8_1 | GTCATCTTAGTCATT | AACGAACACCTCAGTACG | 15 | 17 |
| GTAINS | ACCTG | TAATGACTAAGATG | | |
| HBB_ED8_4A | GCATGGTGCACCTG | AGACTTCTCCACAGGAGT | 13 | 14 |
| TOT | ACTCCTG | CAGGTGCAC | | |

TABLE 4
Sequences of primers used for mammalian cell
genomic DNA amplification and HTS¹⁸¹.

| DESCRIPTION | SEQUENCE (SEQ ID NOS: 3811-3863) |
|---|---|
| HEK3 FWD | ACACTCTTTCCCTACACGACGCTCTTCCGATCTNNNNATGTG |
| | GGCTGCCTAGAAAGG |
| HEK3 REV | TGGAGTTCAGACGTGTGCTCTTCCGATCTCCCAGCCAAACTT |
| | GTCAACC |
| RNF2 FWD | ACACTCTTTCCCTACACGACGCTCTTCCGATCTNNNNACGTC |
| | TCATATGCCCCTTGG |
| RNF2 REV | TGGAGTTCAGACGTGTGCTCTTCCGATCTACGTAGGAATTTT |
| | GGTGGGACA |
| HEK4 FWD | ACACTCTTTCCCTACACGACGCTCTTCCGATCTNNNNGAACC |
| | CAGGTAGCCAGAGAC |
| HEK4 REV | TGGAGTTCAGACGTGTGCTCTTCCGATCTTCCTTTCAACCCG |
| | AACGGAG |
| EMX1 FWD | ACACTCTTTCCCTACACGACGCTCTTCCGATCTNNNNCAGCT |
| | CAGCCTGAGTGTTGA |
| EMX1 REV | TGGAGTTCAGACGTGTGCTCTTCCGATCTCTCGTGGGTTTGT |
| | GGTTGC |
| FANCF FWD | ACACTCTTTCCCTACACGACGCTCTTCCGATCTNNNNCATTG |
| | CAGAGAGGCGTATCA |
| FANCF REV | TGGAGTTCAGACGTGTGCTCTTCCGATCTGGGGTCCCAGGT |
| | GCTGAC |
| HBB FWD | ACACTCTTTCCCTACACGACGCTCTTCCGATCTNNNNAGGGT |
| | TGGCCAATCTACTCCC |
| HBB REV | TGGAGTTCAGACGTGTGCTCTTCCGATCTGTCTTCTCTGTCT |
| | CCACATGCC |
| PRNP FWD | ACACTCTTTCCCTACACGACGCTCTTCCGATCTNNNNGTCAG |
| | TGGAACAAGCCGAGT |
| PRNP REV | TGGAGTTCAGACGTGTGCTCTTCCGATCTACTTGGTTGGGGT |
| | AACGGTG |
| HEXA FWD | ACACTCTTTCCCTACACGACGCTCTTCCGATCTNNNNCATAC |
| | AGGTGTGGCGAGAGG |
| HEXA REV | TGGAGTTCAGACGTGTGCTCTTCCGATCTCCAGCCTCCTTTG |
| | GTTAGCA |
| RUNX1 FWD | ACACTCTTTCCCTACACGACGCTCTTCCGATCTNNNNTCACA |
| | AACAAGACAGGGAACTG |
| RUNX1 REV | TGGAGTTCAGACGTGTGCTCTTCCGATCTAGATGTAGGGCTA |
| | GAGGGGTG |
| VEGFA FWD | ACACTCTTTCCCTACACGACGCTCTTCCGATCTNNNNACTTG |
| | GTGCCAAATTCTTCTCC |
| VEGFA REV | TGGAGTTCAGACGTGTGCTCTTCCGATCTAAAGAGGGAATG |
| | GGCTTTGGA |
| DNMT FWD | ACACTCTTTCCCTACACGACGCTCTTCCGATCTNNNNCACAA |
| | CAGCTTCATGTCAGCC |
| DNMT REV | TGGAGTTCAGACGTGTGCTCTTCCGATCTACGTTAATGTTTC |
| | CTGATGGTCC |
| HEK3 OFF-TARGET | ACACTCTTTCCCTACACGACGCTCTTCCGATCTNNNNTCCCC |
| SITE 1 FWD | TGTTGACCTGGAGAA |
| HEK3 OFF-TARGET | TGGAGTTCAGACGTGTGCTCTTCCGATCTCACTGTACTTGCC |
| SITE 1 REV | CTGACCA |
| HEK3 OFF-TARGET | ACACTCTTTCCCTACACGACGCTCTTCCGATCTNNNNTTGGT |
| SITE 2 FWD | GTTGACAGGGAGCAA |
| HEK3 OFF-TARGET | TGGAGTTCAGACGTGTGCTCTTCCGATCTCTGAGATGTGGGC |
| SITE 2 REV | AGAAGGG |
| HEK3 OFF-TARGET | ACACTCTTTCCCTACACGACGCTCTTCCGATCTNNNNTGAGA |
| SITE 3 FWD | GGGAACAGAAGGGCT |
| HEK3 OFF-TARGET | TGGAGTTCAGACGTGTGCTCTTCCGATCTGTCCAAAGGCCC |
| SITE 3 REV | AAGAACCT |
| HEK3 OFF-TARGET | ACACTCTTTCCCTACACGACGCTCTTCCGATCTNNNNTCCTA |
| SITE 4 FWD | GCACTTTGGAAGGTCG |
| HEK3 OFF-TARGET | TGGAGTTCAGACGTGTGCTCTTCCGATCTGCTCATCTTAATCT |
| SITE 4 REV | GCTCAGCC |
| HEK4 OFF-TARGET | ACACTCTTTCCCTACACGACGCTCTTCCGATCTNNNNGGCAT |
| SITE 1 FWD | GGCTTCTGAGACTCA |
| HEK4 OFF-TARGET | TGGAGTTCAGACGTGTGCTCTTCCGATCTGTCTCCCTTGCAC |
| SITE 1 REV | TCCCTGTCTTT |
| HEK4 OFF-TARGET | ACACTCTTTCCCTACACGACGCTCTTCCGATCTNNNNTTTGG |
| SITE 2 FWD | CAATGGAGGCATTGG |
| HEK4 OFF-TARGET | TGGAGTTCAGACGTGTGCTCTTCCGATCTGAAGAGGCTGCC |
| SITE 2 REV | CATGAGAG |
| HEK4 OFF-TARGET | ACACTCTTTCCCTACACGACGCTCTTCCGATCTNNNNGGTCT |
| SITE 3 FWD | GAGGCTCGAATCCTG |
| HEK4 OFF-TARGET | TGGAGTTCAGACGTGTGCTCTTCCGATCTCTGTGGCCTCCAT |
| SITE 3 REV | ATCCCTG |
| HEK4 OFF-TARGET | ACACTCTTTCCCTACACGACGCTCTTCCGATCTNNNNTTTCC |
| SITE 4 FWD | ACCAGAACTCAGCCC |
| HEK4 OFF-TARGET | TGGAGTTCAGACGTGTGCTCTTCCGATCTCCTCGGTTCCTCC |
| SITE 4 REV | ACAACAC |
| EMX1 OFF- | ACACTCTTTCCCTACACGACGCTCTTCCGATCTNNNNGTGGG |
| TARGET SITE 1 | GAGATTTGCATCTGTGGAGG |
| FWD | |
| EMX1 OFF- | TGGAGTTCAGACGTGTGCTCTTCCGATCTGCTTTTATACCATC |
| TARGET SITE 1 | TTGGGGTTACAG |
| REV | |
| EMX1 OFF- | ACACTCTTTCCCTACACGACGCTCTTCCGATCTNNNNCAATG |
| TARGET SITE 2 | TGCTTCAACCCATCACGGC |
| FWD | |
| EMX1 OFF- | TGGAGTTCAGACGTGTGCTCTTCCGATCTCCATGAATTTGTG |
| TARGET SITE 2 | ATGGATGCAGTCTG |
| REV | |
| EMX1 OFF- | ACACTCTTTCCCTACACGACGCTCTTCCGATCTNNNNGAGAA |
| TARGET SITE 3 | GGAGGTGCAGGAGCTAGAC |
| FWD | |
| EMX1 OFF- | TGGAGTTCAGACGTGTGCTCTTCCGATCTCATCCCGACCTTC |
| TARGET SITE 3 | ATCCCTCCTGG |
| REV | |
| EMX1 OFF- | ACACTCTTTCCCTACACGACGCTCTTCCGATCTNNNNGTAGT |
| TARGET SITE 4 | TCTGACATTCCTCCTGAGGG |
| FWD | |
| EMX1 OFF- | TGGAGTTCAGACGTGTGCTCTTCCGATCTTCAAACAAGGTG |
| TARGET SITE 4 | CAGATACAGCA |
| REV | |
| FANCF OFF- | ACACTCTTTCCCTACACGACGCTCTTCCGATCTNNNNGCGGG |
| TARGET SITE 1 | CAGTGGCGTCTTAGTCG |
| FWD | |
| FANCF OFF- | TGGAGTTCAGACGTGTGCTCTTCCGATCTCCCTGGGTTTGGT |
| TARGET SITE 1 | TGGCTGCTC |
| REV | |
| FANCF OFF- | ACACTCTTTCCCTACACGACGCTCTTCCGATCTNNNNCTCCT |
| TARGET SITE 2 | TGCCGCCCAGCCGGTC |
| FWD | |
| FANCF OFF- | TGGAGTTCAGACGTGTGCTCTTCCGATCTCACTGGGGAAGA |
| TARGET SITE 2 | GGCGAGGACAC |
| REV | |
| FANCF OFF- | ACACTCTTTCCCTACACGACGCTCTTCCGATCTNNNNCCAGT |
| TARGET SITE 3 | GTTTCCCATCCCCAACAC |
| FWD | |
| FANCF OFF- | TGGAGTTCAGACGTGTGCTCTTCCGATCTGAATGGATCCCCC |
| TARGET SITE 3 | CCTAGAGCTC |
| REV | |
| FANCF OFF- | ACACTCTTTCCCTACACGACGCTCTTCCGATCTNNNNCAGGC |
| TARGET SITE 4 | CCACAGGTCCTTCTGGA |
| FWD | |

TABLE 5
Sequences of 100-mer single-stranded DNA oligonucleotide donor
templates used in HDR experiments and in the creation of the
HBB E6V HEK293T cell line. Oligonucleotides are 100-103 nt in
length with homology arms centered around the site of the edit.
Oligonucleotides were from Integrated DNA Technologies, purified
by PAGE.

| | |
|---|---|
| HEK3 +3 A TO T | GCTTCTCCAGCCCTGGCCTGGGTCAATCCTTGGGGCCCAG |
| | ACTGAGCACGTGTTGGCAGAGGAAAGGAAGCCCTGCTTC |
| | CTCCAGAGGGCGTCGCAGGAC (SEQ ID NO: 717) |
| HEK3 +3 A TO T, +5, 6 | GCTTCTCCAGCCCTGGCCTGGGTCAATCCTTGGGGCCCAG |
| GG TO TT | ACTGAGCACGTGTTTTCAGAGGAAAGGAAGCCCTGCTTC |
| | CTCCAGAGGGCGTCGCAGGAC (SEQ ID NO: 718) |
| HEK3 +1 T TO G | GCTTCTCCAGCCCTGGCCTGGGTCAATCCTTGGGGCCCAG |
| | ACTGAGCACGGGATGGCAGAGGAAAGGAAGCCCTGCTTC |
| | CTCCAGAGGGCGTCGCAGGAC (SEQ ID NO: 719) |
| HEK3 +3 A TO C | GCTTCTCCAGCCCTGGCCTGGGTCAATCCTTGGGGCCCAG |
| | ACTGAGCACGTGCTGGCAGAGGAAAGGAAGCCCTGCTTC |
| | CTCCAGAGGGCGTCGCAGGAC (SEQ ID NO: 720) |
| HEK3 +1 CTT | GCTTCTCCAGCCCTGGCCTGGGTCAATCCTTGGGGCCCAG |
| INSERTION | ACTGAGCACGCTTTGATGGCAGAGGAAAGGAAGCCCTGC |
| | TTCCTCCAGAGGGCGTCGCAGGAC (SEQ ID NO: 721) |
| RNF2 +1 C TO A | CCCAGTTTACACGTCTCATATGCCCCTTGGCAGTCATCTTA |
| | GTCATTACATGAGGTGTTCGTTGTAACTCATATAAACTGAG |
| | TTCCCATGTTTTGCTTAA (SEQ ID NO: 722) |
| RNF2 +1 C TO G | CCCAGTTTACACGTCTCATATGCCCCTTGGCAGTCATCTTA |
| | GTCATTACGTGAGGTGTTCGTTGTAACTCATATAAACTGAG |
| | TTCCCATGTTTTGCTTAA (SEQ ID NO: 723) |
| RNF2 +1 GTA | CAGTTTACACGTCTCATATGCCCCTTGGCAGTCATCTTAGT |
| INSERTION | CATTACGTACTGAGGTGTTCGTTGTAACTCATATAAACTGA |
| | GTTCCCATGTTTTGCTTA (SEQ ID NO: 724) |
| HBB E6V | ACTTCATCCACGTTCACCTTGCCCCACAGGGCAGTAACGG |
| INSTALLATION (ALSO | CAGACTTCTCCACAGGAGTCAGATGCACCATGGTGTCTGT |
| USED FOR CREATION | TTGAGGTTGCTAGTGAACAC (SEQ ID NO: 725) |
| OF THE HBB E6V | |
| HEK293T CELL LINE) | |
| HBB E6V | ACTTCATCCACGTTCACCTTGCCCCACAGGGCAGTAACGG |
| CORRECTION | CAGACTTCTCCTCAGGAGTCAGGTGCACCATGGTGTCTGT |
| PROTOSPACER A | TTGAGGTTGCTAGTGAACAC (SEQ ID NO: 726) |
| HBB E6V | GTGTTCACTAGCAACCTCAAACAGACACCATGGTGCACCT |
| CORRECTION | GACTCCTGAGGAGAAGTCTGCCGTTACTGCCCTGTGGGGC |
| PROTOSPACER B | AAGGTGAACGTGGATGAAGT (SEQ ID NO: 727) |
| HBB E6V | GTGTTCACTAGCAACCTCAAACAGACACCATGGTGCACCT |
| CORRECTION | GACTCCTGATGAGAAGTCTGCCGTTACTGCCCTGTGGGGC |
| PROTOSPACER B, | AAGGTGAACGTGGATGAAGT (SEQ ID NO: 728) |
| SILENT PAM | |
| MUTATION | |
| PRNP G127V | CACATGGCTGGTGCTGCAGCAGCTGGGGCAGTGGTGGGG |
| | GGCCTTGGCGTCTACATGCTGGGAAGTGCCATGAGCAGGC |
| | CCATCATACATTTCGGCAGTG (SEQ ID NO: 729) |

[1437] Additional Sequences

[1438] Sequences of yeast dual fluorescent reporter plasmids used herein

p425-GFP_stop_mCherry:
(SEQ ID NO: 730)
ATGTCTAAAGGTGAAGAATTATTCACTGGTGTTGTCCCAATTTTGGTTGAATTAGAT
GGTGATGTTAATGGTCACAAATTTTCTGTCTCCGGTGAAGGTGAAGGTGATGCTAC
TTACGGTAAATTGACCTTAAAATTTATTTGTACTACTGGTAAATTGCCAGTTCCATG
GCCAACCTTAGTCACTACTTTCGGTTATGGTGTTCAATGTTTTGCTAGATACCCAGA
TCATATGAAACAACATGACTTTTTCAAGTCTGCCATGCCAGAAGGTTATGTTCAAG
AAAGAACTATTTTTTTCAAAGATGACGGTAACTACAAGACCAGAGCTGAAGTCAA
GTTTGAAGGTGATACCTTAGTTAATAGAATCGAATTAAAAGGTATTGATTTTAAAGA
AGATGGTAACATTTTAGGTCACAAATTGGAATACAACTATAACTCTCACAATGTTTA
CATCATGGCTGACAAACAAAAGAATGGTATCAAAGTTAACTTCAAAATTAGACAC
AACATTGAAGATGGTTCTGTTCAATTAGCTGACCATTATCAACAAAATACTCCAATT
GGTGATGGTCCAGTCTTGTTACCAGACAACCATTACTTATCCACTCAATCTGCCTTA
TCCAAAGATCCAAACGAAAAGAGAGACCACATGGTCTTGTTAGAATTTGTTACTG
CTGCTGGTATTACCCATGGTATGGATGAATTGTACAAAGCTAGCAACCTGGGTCAA
TCCTTGGGGCCCAGACTGAGCACGTGATGGCAGAGCACAGGAGACGTCATGGT
TTCAAAAGGTGAAGAAGATAATATGGCTATTATTAAAGAATTTATGAGATTTAAAGTTCATA
TGGAAGGTTCAGTTAATGGTCATGAATTTGAAATTGAAGGTGAAGGTGAAGGTAGACCA
TATGAAGGTACTCAAACTGCTAAATTGAAAGTTACTAAAGGTGGTCCATTACCATTTGCTT
GGGATATTTTGTCACCACAATTTATGTATGGTTCAAAAGCTTATGTTAAACATCCAGCTGA
TATTCCAGATTATTTAAAATTGTCATTTCCAGAAGGTTTTAAATGGGAAAGAGTTATGAATT
TTGAAGATGGTGGTGTTGTTACTGTTACTCAAGATTCATCATTACAAGATGGTGAATTTAT
TTATAAAGTTAAATTGAGAGGTACTAATTTTCCATCAGATGGTCCAGTTATGCAAAAAAAA
ACTATGGGTTGGGAAGCTTCATCAGAAAGAATGTATCCAGAAGATGGTGCTTTAAAAGG
TGAAATTAAACAAAGATTGAAATTAAAAGATGGTGGTCATTATGATGCTGAAGTTAAAACT
ACTTATAAAGCTAAAAAACCAGTTCAATTACCAGGTGCTTATAATGTTAATATTAAATTGGA
TATTACTTCACATAATGAAGATTATACTATTGTTGAACAATATGAAAGAGCTGAAGGTAGAC
ATTCAACTGGTGGTATGGATGAATTATATAAAGGTACCGCTCGAGCAGCTGTGATTGATT
GAGTCGACTTGGTTGAACACGTTGCCAAGGCTTAAGTGAATTTACTTTAAATCTTG
CATTTAAATAAATTTTCTTTTTATAGCTTTATGACTTAGTTTCAATTTATATACTATTTT
AATGACATTTTCGATTCGGATCCACTAGTTCTAGAGCGGCCGCCACCGCGGTGGAG
CTCCAGCTTTTGTTCCCTTTAGTGAGGGTTAATTGCGCGCTTGGCGTAATCATGGTC
ATAGCTGTTTCCTGTGTGAAATTGTTATCCGCTCACAATTCCACACAACATAGGAG
CCGGAAGCATAAAGTGTAAAGCCTGGGGTGCCTAATGAGTGAGGTAACTCACATT
AATTGCGTTGCGCTCACTGCCCGCTTTCCAGTCGGGAAACCTGTCGTGCCAGCTG
CATTAATGAATCGGCCAACGCGCGGGGAGAGGCGGTTTGCGTATTGGGCGCTCTT
CCGCTTCCTCGCTCACTGACTCGCTGCGCTCGGTCGTTCGGCTGCGGCGAGCGGT
ATCAGCTCACTCAAAGGCGGTAATACGGTTATCCACAGAATCAGGGGATAACGCA
GGAAAGAACATGTGAGCAAAAGGCCAGCAAAAGGCCAGGAACCGTAAAAAGGC
CGCGTTGCTGGCGTTTTTCCATAGGCTCCGCCCCCCTGACGAGCATCACAAAAATC
GACGCTCAAGTCAGAGGTGGCGAAACCCGACAGGACTATAAAGATACCAGGCGT
TTCCCCCTGGAAGCTCCCTCGTGCGCTCTCCTGTTCCGACCCTGCCGCTTACCGGA
TACCTGTCCGCCTTTCTCCCTTCGGGAAGCGTGGCGCTTTCTCATAGCTCACGCTG
TAGGTATCTCAGTTCGGTGTAGGTCGTTCGCTCCAAGCTGGGCTGTGTGCACGAAC
CCCCCGTTCAGCCCGACCGCTGCGCCTTATCCGGTAACTATCGTCTTGAGTCCAAC
CCGGTAAGACACGACTTATCGCCACTGGCAGCAGCCACTGGTAACAGGATTAGCA
GAGCGAGGTATGTAGGCGGTGCTACAGAGTTCTTGAAGTGGTGGCCTAACTACGG
CTACACTAGAAGGACAGTATTTGGTATCTGCGCTCTGCTGAAGCCAGTTACCTTCG
GAAAAAGAGTTGGTAGCTCTTGATCCGGCAAACAAACCACCGCTGGTAGCGGTG
GTTTTTTTGTTTGCAAGCAGCAGATTACGCGCAGAAAAAAAGGATCTCAAGAAGA
TCCTTTGATCTTTTCTACGGGGTCTGACGCTCAGTGGAACGAAAACTCACGTTAAG
GGATTTTGGTCATGAGATTATCAAAAAGGATCTTCACCTAGATCCTTTTAAATTAAA
AATGAAGTTTTAAATCAATCTAAAGTATATATGAGTAAACTTGGTCTGACAGTTACC
AATGCTTAATCAGTGAGGCACCTATCTCAGCGATCTGTCTATTTCGTTCATCCATAG
TTGCCTGACTCCCCGTCGTGTAGATAACTACGATACGGGAGGGCTTACCATCTGGC
CCCAGTGCTGCAATGATACCGCGAGACCCACGCTCACCGGCTCCAGATTTATCAGC
AATAAACCAGCCAGCCGGAAGGGCCGAGCGCAGAAGTGGTCCTGCAACTTTATCC
GCCTCCATCCAGTCTATTAATTGTTGCCGGGAAGCTAGAGTAAGTAGTTCGCCAGT
TAATAGTTTGCGCAACGTTGTTGCCATTGCTACAGGCATCGTGGTGTCACGCTCGT
CGTTTGGTATGGCTTCATTCAGCTCCGGTTCCCAACGATCAAGGCGAGTTACATGA
TCCCCCATGTTGTGCAAAAAAGCGGTTAGCTCCTTCGGTCCTCCGATCGTTGTCAG
AAGTAAGTTGGCCGCAGTGTTATCACTCATGGTTATGGCAGCACTGCATAATTCTC
TTACTGTCATGCCATCCGTAAGATGCTTTTCTGTGACTGGTGAGTACTCAACCAAG
TCATTCTGAGAATAGTGTATGCGGCGACCGAGTTGCTCTTGCCCGGCGTCAATACG
GGATAATACCGCGCCACATAGCAGAACTTTAAAAGTGCTCATCATTGGAAAACGTT
CTTCGGGGCGAAAACTCTCAAGGATCTTACCGCTGTTGAGATCCAGTTCGATGTAA
CCCACTCGTGCACCCAACTGATCTTCAGCATCTTTTACTTTCACCAGCGTTTCTGG
GTGAGCAAAAACAGGAAGGCAAAATGCCGCAAAAAAGGGAATAAGGGCGACAC
GGAAATGTTGAATACTCATACTCTTCCTTTTTCAATATTATTGAAGCATTTATCAGGG
TTATTGTCTCATGAGCGGATACATATTTGAATGTATTTAGAAAAATAAACAAATAGG
GGTTCCGCGCACATTTCCCCGAAAAGTGCCACCTGAACGAAGCATCTGTGCTTCA
TTTTGTAGAACAAAAATGCAACGCGAGAGCGCTAATTTTTCAAACAAAGAATCTG
AGCTGCATTTTTACAGAACAGAAATGCAACGCGAAAGCGCTATTTTACCAACGAA
GAATCTGTGCTTCATTTTTGTAAAACAAAAATGCAACGCGAGAGCGCTAATTTTTC
AAACAAAGAATCTGAGCTGCATTTTTACAGAACAGAAATGCAACGCGAGAGCGCT
ATTTTACCAACAAAGAATCTATACTTCTTTTTTGTTCTACAAAAATGCATCCCGAGA
GCGCTATTTTTCTAACAAAGCATCTTAGATTACTTTTTTTCTCCTTTGTGCGCTCTAT
AATGCAGTCTCTTGATAACTTTTTGCACTGTAGGTCCGTTAAGGTTAGAAGAAGGC
TACTTTGGTGTCTATTTTCTCTTCCATAAAAAAAGCCTGACTCCACTTCCCGCGTTT
ACTGATTACTAGCGAAGCTGCGGGTGCATTTTTTCAAGATAAAGGCATCCCCGATT
ATATTCTATACCGATGTGGATTGCGCATACTTTGTGAACAGAAAGTGATAGCGTTGA
TGATTCTTCATTGGTCAGAAAATTATGAACGGTTTCTTCTATTTTGTCTCTATATACT
ACGTATAGGAAATGTTTACATTTTCGTATTGTTTTCGATTCACTCTATGAATAGTTCT
TACTACAATTTTTTTGTCTAAAGAGTAATACTAGAGATAAACATAAAAAATGTAGAG
GTCGAGTTTAGATGCAAGTTCAAGGAGCGAAAGGTGGATGGGTAGGTTATATAGG
GATATAGCACAGAGATATATAGCAAAGAGATACTTTTGAGCAATGTTTGTGGAAGC
GGTATTCGCAATATTTTAGTAGCTCGTTACAGTCCGGTGCGTTTTTGGTTTTTTGAA
AGTGCGTCTTCAGAGCGCTTTTGGTTTTCAAAAGCGCTCTGAAGTTCCTATACTTT
CTAGAGAATAGGAACTTCGGAATAGGAACTTCAAAGCGTTTCCGAAAACGAGCGC
TTCCGAAAATGCAACGCGAGCTGCGCACATACAGCTCACTGTTCACGTCGCACCT
ATATCTGCGTGTTGCCTGTATATATATATACATGAGAAGAACGGCATAGTGCGTGTTT
ATGCTTAAATGCGTACTTATATGCGTCTATTTATGTAGGATGAAAGGTAGTCTAGTAC
CTCCTGTGATATTATCCCATTCCATGCGGGGTATCGTATGCTTCCTTCAGCACTACCC
TTTAGCTGTTCTATATGCTGCCACTCCTCAATTGGATTAGTCTCATCCTTCAATGCTA
TCATTTCCTTTGATATTGGATCATACTAAGAAACCATTATTATCATGACATTAACCTA
TAAAAATAGGCGTATCACGAGGCCCTTTCGTCTCGCGCGTTTCGGTGATGACGGTG
AAAACCTCTGACACATGCAGCTCCCGGAGACGGTCACAGCTTGTCTGTAAGCGGA
TGCCGGGAGCAGACAAGCCCGTCAGGGCGCGTCAGCGGGTGTTGGCGGGTGTCG
GGGCTGGCTTAACTATGCGGCATCAGAGCAGATTGTACTGAGAGTGCACCATATCG
ACTACGTCGTAAGGCCGTTTCTGACAGAGTAAAATTCTTGAGGGAACTTTCACCAT
TATGGGAAATGCTTCAAGAAGGTATTGACTTAAACTCCATCAAATGGTCAGGTCAT
TGAGTGTTTTTTATTTGTTGTATTTTTTTTTTTTTAGAGAAAATCCTCCAATATCAAA
TTAGGAATCGTAGTTTCATGATTTTCTGTTACACCTAACTTTTTGTGTGGTGCCCTC
CTCCTTGTCAATATTAATGTTAAAGTGCAATTCTTTTTCCTTATCACGTTGAGCCATT
AGTATCAATTTGCTTACCTGTATTCCTTTACTATCCTCCTTTTTCTCCTTCTTGATAA
ATGTATGTAGATTGCGTATATAGTTTCGTCTACCCTATGAACATATTCCATTTTGTAAT
TTCGTGTCGTTTCTATTATGAATTTCATTTATAAAGTTTATGTACAAATATCATAAAA
AAAGAGAATCTTTTTAAGCAAGGATTTTCTTAACTTCTTCGGCGACAGCATCACCG
ACTTCGGTGGTACTGTTGGAACCACCTAAATCACCAGTTCTGATACCTGCATCCAA
AACCTTTTTAACTGCATCTTCAATGGCCTTACCTTCTTCAGGCAAGTTCAATGACA
ATTTCAACATCATTGCAGCAGACAAGATAGTGGCGATAGGGTCAACCTTATTCTTT
GGCAAATCTGGAGCAGAACCGTGGCATGGTTCGTACAAACCAAATGCGGTGTTCT
TGTCTGGCAAAGAGGCCAAGGACGCAGATGGCAACAAACCCAAGGAACCTGGGA
TAACGGAGGCTTCATCGGAGATGATATCACCAAACATGTTGCTGGTGATTATAATAC
CATTTAGGTGGGTTGGGTTCTTAACTAGGATCATGGCGGCAGAATCAATCAATTGA
TGTTGAACCTTCAATGTAGGGAATTCGTTCTTGATGGTTTCCTCCACAGTTTTTCTC
CATAATCTTGAAGAGGCCAAAAGATTAGCTTTATCCAAGGACCAAATAGGCAATGG
TGGCTCATGTTGTAGGGCCATGAAAGCGGCCATTCTTGTGATTCTTTGCACTTCTG
GAACGGTGTATTGTTCACTATCCCAAGCGACACCATCACCATCGTCTTCCTTTCTCT
TACCAAAGTAAATACCTCCCACTAATTCTCTGACAACAACGAAGTCAGTACCTTTA
GCAAATTGTGGCTTGATTGGAGATAAGTCTAAAAGAGAGTCGGATGCAAAGTTAC
ATGGTCTTAAGTTGGCGTACAATTGAAGTTCTTTACGGATTTTTAGTAAACCTTGTT
CAGGTCTAACACTACCGGTACCCCATTTAGGACCAGCCACAGCACCTAACAAAAC
GGCATCAACCTTCTTGGAGGCTTCCAGCGCCTCATCTGGAAGTGGGACACCTGTA
GCATCGATAGCAGCACCACCAATTAAATGATTTTCGAAATCGAACTTGACATTGGA
ACGAACATCAGAAATAGCTTTAAGAACCTTAATGGCTTCGGCTGTGATTTCTTGAC
CAACGTGGTCACCTGGCAAAACGACGATCTTCTTAGGGGCAGACATAGGGGCAG
ACATTAGAATGGTATATCCTTGAAATATATATATATATTGCTGAAATGTAAAAGGTAA
GAAAAGTTAGAAAGTAAGACGATTGCTAACCACCTATTGGAAAAAACAATAGGTC
CTTAAATAATATTGTCAACTTCAAGTATTGTGATGCAAGCATTTAGTCATGAACGCT
TCTCTATTCTATATGAAAAGCCGGTTCCGGCCTCTCACCTTTCCTTTTTCTCCCAATT
TTTCAGTTGAAAAAGGTATATGCGTCAGGCGACCTCTGAAATTAACAAAAAATTTC
CAGTCATCGAATTTGATTCTGTGCGATAGCGCCCCTGTGTGTTCTCGTTATGTTGAG
GAAAAAAATAATGGTTGCTAAGAGATTCGAACTCTTGCATCTTACGATACCTGAGT
ATTCCCACAGTTAACTGCGGTCAAGATATTTCTTGAATCAGGCGCCTTAGACCGCT
CGGCCAAACAACCAATTACTTGTTGAGAAATAGAGTATAATTATCCTATAAATATAA
CGTTTTTGAACACACATGAACAAGGAAGTACAGGACAATTGATTTTGAAGAGAAT
GTGGATTTTGATGTAATTGTTGGGATTCCATTTTTAATAAGGCAATAATATTAGGTAT
GTGGATATACTAGAAGTTCTCCTCGACCGTCGATATGCGGTGTGAAATACCGCACA
GATGCGTAAGGAGAAAATACCGCATCAGGAAATTGTAAACGTTAATATTTTGTTAA
AATTCGCGTTAAATTTTTGTTAAATCAGCTCATTTTTTAACCAATAGGCCGAAATCG
GCAAAATCCCTTATAAATCAAAAGAATAGACCGAGATAGGGTTGAGTGTTGTTCCA
GTTTGGAACAAGAGTCCACTATTAAAGAACGTGGACTCCAACGTCAAAGGGCGA
AAAACCGTCTATCAGGGCGATGGCCCACTACGTGAACCATCACCCTAATCAAGTTT
TTTGGGGTCGAGGTGCCGTAAAGCACTAAATCGGAACCCTAAAGGGAGCCCCCGA
TTTAGAGCTTGACGGGGAAAGCCGGCGAACGTGGCGAGAAAGGAAGGGAAGAA
AGCGAAAGGAGCGGGCGCTAGGGCGCTGGCAAGTGTAGCGGTCACGCTGCGCGT
AACCACCACACCCGCCGCGCTTAATGCGCCGCTACAGGGCGCGTCGCGCCATTCG
CCATTCAGGCTGCGCAACTGTTGGGAAGGGCGATCGGTGCGGGCCTCTTCGCTAT
TACGCCAGCTGGCGAAAGGGGGATGTGCTGCAAGGCGATTAAGTTGGGTAACGCC
AGGGTTTTCCCAGTCACGACGTTGTAAAACGACGGCCAGTGAGCGCGCGTAATAC
GACTCACTATAGGGCGAATTGGGTACCGGGCCCCCCCTCGAGGTCGACGGTATCG
ATAAGCTTGATATCGAATTCCTGCAGCCCGGGGGATCCGTTAGAATCATTTTGAATA
AAAAACACGCTTTTTCAGTTCGAGTTTATCATTATCAATACTGCCATTTCAAAGAAT
ACGTAAATAATTAATAGTAGTGATTTTCCTAACTTTATTTAGTCAAAAAATTAGCCTT
TTAATTCTGCTGTAACCCGTACATGCCCAAAATAGGGGGCGGGTTACACAGAATAT
ATAACATCGTAGGTGTCTGGGTGAACAGTTTATTCCTGGCATCCACTAAATATAATG
GAGCCCGCTTTTTAAGCTGGCATCCAGAAAAAAAAAGAATCCCAGCACCAAAATA
TTGTTTTCTTCACCAACCATCAGTTCATAGGTCCATTCTCTTAGCGCAACTACAGAG
AACAGGGGCACAAACAGGCAAAAAACGGGCACAACCTCAATGGAGTGATGCAA
CCTGCCTGGAGTAAATGATGACACAAGGCAATTGACCCACGCATGTATCTATCTCA
TTTTCTTACACCTTCTATTACCTTCTGCTCTCTCTGATTTGGAAAAAGCTGAAAAAA
AAGGTTGAAACCAGTTCCCTGAAATTATTCCCCTACTTGACTAATAAGTATATAAAG
ACGGTAGGTATTGATTGTAATTCTGTAAATCTATTTCTTAAACTTCTTAAATTCTACT
TTTATAGTTAGTCTTTTTTTTAGTTTTAAAACACCAAGAACTTAGTTTCGAATAAAC
ACACATAAACAAACAAAGAATTC
p425-GFP_+1fs_mCherry:
(SEQ ID NO: 731)
ATGTCTAAAGGTGAAGAATTATTCACTGGTGTTGTCCCAATTTTGGTTGAATTAGAT
GGTGATGTTAATGGTCACAAATTTTCTGTCTCCGGTGAAGGTGAAGGTGATGCTAC
TTACGGTAAATTGACCTTAAAATTTATTTGTACTACTGGTAAATTGCCAGTTCCATG
GCCAACCTTAGTCACTACTTTCGGTTATGGTGTTCAATGTTTTGCTAGATACCCAGA
TCATATGAAACAACATGACTTTTTCAAGTCTGCCATGCCAGAAGGTTATGTTCAAG
AAAGAACTATTTTTTTCAAAGATGACGGTAACTACAAGACCAGAGCTGAAGTCAA
GTTTGAAGGTGATACCTTAGTTAATAGAATCGAATTAAAAGGTATTGATTTTAAAGA
AGATGGTAACATTTTAGGTCACAAATTGGAATACAACTATAACTCTCACAATGTTTA
CATCATGGCTGACAAACAAAAGAATGGTATCAAAGTTAACTTCAAAATTAGACAC
AACATTGAAGATGGTTCTGTTCAATTAGCTGACCATTATCAACAAAATACTCCAATT
GGTGATGGTCCAGTCTTGTTACCAGACAACCATTACTTATCCACTCAATCTGCCTTA
TCCAAAGATCCAAACGAAAAGAGAGACCACATGGTCTTGTTAGAATTTGTTACTG
CTGCTGGTATTACCCATGGTATGGATGAATTGTACAAAGCTAGCAAACCTGGGTCA
ATCCTTGGGGCCCAGACTGAGCACGTGATGGCAGAGCACAGGAGACGTCATGG
TTTCAAAAGGTGAAGAAGATAATATGGCTATTATTAAAGAATTTATGAGATTTAAAGTTCAT
ATGGAAGGTTCAGTTAATGGTCATGAATTTGAAATTGAAGGTGAAGGTGAAGGTAGACC
ATATGAAGGTACTCAAACTGCTAAATTGAAAGTTACTAAAGGTGGTCCATTACCATTTGCT
TGGGATATTTTGTCACCACAATTTATGTATGGTTCAAAAGCTTATGTTAAACATCCAGCTG
ATATTCCAGATTATTTAAAATTGTCATTTCCAGAAGGTTTTAAATGGGAAAGAGTTATGAAT
TTTGAAGATGGTGGTGTTGTTACTGTTACTCAAGATTCATCATTACAAGATGGTGAATTTA
TTTATAAAGTTAAATTGAGAGGTACTAATTTTCCATCAGATGGTCCAGTTATGCAAAAAAA
AACTATGGGTTGGGAAGCTTCATCAGAAAGAATGTATCCAGAAGATGGTGCTTTAAAAG
GTGAAATTAAACAAAGATTGAAATTAAAAGATGGTGGTCATTATGATGCTGAAGTTAAAAC
TACTTATAAAGCTAAAAAACCAGTTCAATTACCAGGTGCTTATAATGTTAATATTAAATTGG
ATATTACTTCACATAATGAAGATTATACTATTGTTGAACAATATGAAAGAGCTGAAGGTAGA
CATTCAACTGGTGGTATGGATGAATTATATAAAGGTACCGCTCGAGCAGCTGTGATTGAT
TGAGTCGACTTGGTTGAACACGTTGCCAAGGCTTAAGTGAATTTACTTTAAATCTT
GCATTTAAATAAATTTTCTTTTTATAGCTTTATGACTTAGTTTCAATTTATATACTATT
TTAATGACATTTTCGATTCGGATCCACTAGTTCTAGAGCGGCCGCCACCGCGGTGG
AGCTCCAGCTTTTGTTCCCTTTAGTGAGGGTTAATTGCGCGCTTGGCGTAATCATG
GTCATAGCTGTTTCCTGTGTGAAATTGTTATCCGCTCACAATTCCACACAACATAGG
AGCCGGAAGCATAAAGTGTAAAGCCTGGGGTGCCTAATGAGTGAGGTAACTCACA
TTAATTGCGTTGCGCTCACTGCCCGCTTTCCAGTCGGGAAACCTGTCGTGCCAGCT
GCATTAATGAATCGGCCAACGCGCGGGGAGAGGCGGTTTGCGTATTGGGCGCTCT
TCCGCTTCCTCGCTCACTGACTCGCTGCGCTCGGTCGTTCGGCTGCGGCGAGCGG
TATCAGCTCACTCAAAGGCGGTAATACGGTTATCCACAGAATCAGGGGATAACGCA
GGAAAGAACATGTGAGCAAAAGGCCAGCAAAAGGCCAGGAACCGTAAAAAGGC
CGCGTTGCTGGCGTTTTTCCATAGGCTCCGCCCCCCTGACGAGCATCACAAAAATC
GACGCTCAAGTCAGAGGTGGCGAAACCCGACAGGACTATAAAGATACCAGGCGT
TTCCCCCTGGAAGCTCCCTCGTGCGCTCTCCTGTTCCGACCCTGCCGCTTACCGGA
TACCTGTCCGCCTTTCTCCCTTCGGGAAGCGTGGCGCTTTCTCATAGCTCACGCTG
TAGGTATCTCAGTTCGGTGTAGGTCGTTCGCTCCAAGCTGGGCTGTGTGCACGAAC
CCCCCGTTCAGCCCGACCGCTGCGCCTTATCCGGTAACTATCGTCTTGAGTCCAAC
CCGGTAAGACACGACTTATCGCCACTGGCAGCAGCCACTGGTAACAGGATTAGCA
GAGCGAGGTATGTAGGCGGTGCTACAGAGTTCTTGAAGTGGTGGCCTAACTACGG
CTACACTAGAAGGACAGTATTTGGTATCTGCGCTCTGCTGAAGCCAGTTACCTTCG
GAAAAAGAGTTGGTAGCTCTTGATCCGGCAAACAAACCACCGCTGGTAGCGGTG
GTTTTTTTGTTTGCAAGCAGCAGATTACGCGCAGAAAAAAAGGATCTCAAGAAGA
TCCTTTGATCTTTTCTACGGGGTCTGACGCTCAGTGGAACGAAAACTCACGTTAAG
GGATTTTGGTCATGAGATTATCAAAAAGGATCTTCACCTAGATCCTTTTAAATTAAA
AATGAAGTTTTAAATCAATCTAAAGTATATATGAGTAAACTTGGTCTGACAGTTACC
AATGCTTAATCAGTGAGGCACCTATCTCAGCGATCTGTCTATTTCGTTCATCCATAG
TTGCCTGACTCCCCGTCGTGTAGATAACTACGATACGGGAGGGCTTACCATCTGGC
CCCAGTGCTGCAATGATACCGCGAGACCCACGCTCACCGGCTCCAGATTTATCAGC
AATAAACCAGCCAGCCGGAAGGGCCGAGCGCAGAAGTGGTCCTGCAACTTTATCC
GCCTCCATCCAGTCTATTAATTGTTGCCGGGAAGCTAGAGTAAGTAGTTCGCCAGT
TAATAGTTTGCGCAACGTTGTTGCCATTGCTACAGGCATCGTGGTGTCACGCTCGT
CGTTTGGTATGGCTTCATTCAGCTCCGGTTCCCAACGATCAAGGCGAGTTACATGA
TCCCCCATGTTGTGCAAAAAAGCGGTTAGCTCCTTCGGTCCTCCGATCGTTGTCAG
AAGTAAGTTGGCCGCAGTGTTATCACTCATGGTTATGGCAGCACTGCATAATTCTC
TTACTGTCATGCCATCCGTAAGATGCTTTTCTGTGACTGGTGAGTACTCAACCAAG
TCATTCTGAGAATAGTGTATGCGGCGACCGAGTTGCTCTTGCCCGGCGTCAATACG
GGATAATACCGCGCCACATAGCAGAACTTTAAAAGTGCTCATCATTGGAAAACGTT
CTTCGGGGCGAAAACTCTCAAGGATCTTACCGCTGTTGAGATCCAGTTCGATGTAA
CCCACTCGTGCACCCAACTGATCTTCAGCATCTTTTACTTTCACCAGCGTTTCTGG
GTGAGCAAAAACAGGAAGGCAAAATGCCGCAAAAAAGGGAATAAGGGCGACAC
GGAAATGTTGAATACTCATACTCTTCCTTTTTCAATATTATTGAAGCATTTATCAGGG
TTATTGTCTCATGAGCGGATACATATTTGAATGTATTTAGAAAAATAAACAAATAGG
GGTTCCGCGCACATTTCCCCGAAAAGTGCCACCTGAACGAAGCATCTGTGCTTCA
TTTTGTAGAACAAAAATGCAACGCGAGAGCGCTAATTTTTCAAACAAAGAATCTG
AGCTGCATTTTTACAGAACAGAAATGCAACGCGAAAGCGCTATTTTACCAACGAA
GAATCTGTGCTTCATTTTTGTAAAACAAAAATGCAACGCGAGAGCGCTAATTTTTC
AAACAAAGAATCTGAGCTGCATTTTTACAGAACAGAAATGCAACGCGAGAGCGCT
ATTTTACCAACAAAGAATCTATACTTCTTTTTTGTTCTACAAAAATGCATCCCGAGA
GCGCTATTTTTCTAACAAAGCATCTTAGATTACTTTTTTTCTCCTTTGTGCGCTCTAT
AATGCAGTCTCTTGATAACTTTTTGCACTGTAGGTCCGTTAAGGTTAGAAGAAGGC
TACTTTGGTGTCTATTTTCTCTTCCATAAAAAAAGCCTGACTCCACTTCCCGCGTTT
ACTGATTACTAGCGAAGCTGCGGGTGCATTTTTTCAAGATAAAGGCATCCCCGATT
ATATTCTATACCGATGTGGATTGCGCATACTTTGTGAACAGAAAGTGATAGCGTTGA
TGATTCTTCATTGGTCAGAAAATTATGAACGGTTTCTTCTATTTTGTCTCTATATACT
ACGTATAGGAAATGTTTACATTTTCGTATTGTTTTCGATTCACTCTATGAATAGTTCT
TACTACAATTTTTTTGTCTAAAGAGTAATACTAGAGATAAACATAAAAAATGTAGAG
GTCGAGTTTAGATGCAAGTTCAAGGAGCGAAAGGTGGATGGGTAGGTTATATAGG
GATATAGCACAGAGATATATAGCAAAGAGATACTTTTGAGCAATGTTTGTGGAAGC
GGTATTCGCAATATTTTAGTAGCTCGTTACAGTCCGGTGCGTTTTTGGTTTTTTGAA
AGTGCGTCTTCAGAGCGCTTTTGGTTTTCAAAAGCGCTCTGAAGTTCCTATACTTT
CTAGAGAATAGGAACTTCGGAATAGGAACTTCAAAGCGTTTCCGAAAACGAGCGC
TTCCGAAAATGCAACGCGAGCTGCGCACATACAGCTCACTGTTCACGTCGCACCT
ATATCTGCGTGTTGCCTGTATATATATATACATGAGAAGAACGGCATAGTGCGTGTTT
ATGCTTAAATGCGTACTTATATGCGTCTATTTATGTAGGATGAAAGGTAGTCTAGTAC
CTCCTGTGATATTATCCCATTCCATGCGGGGTATCGTATGCTTCCTTCAGCACTACCC
TTTAGCTGTTCTATATGCTGCCACTCCTCAATTGGATTAGTCTCATCCTTCAATGCTA
TCATTTCCTTTGATATTGGATCATACTAAGAAACCATTATTATCATGACATTAACCTA
TAAAAATAGGCGTATCACGAGGCCCTTTCGTCTCGCGCGTTTCGGTGATGACGGTG
AAAACCTCTGACACATGCAGCTCCCGGAGACGGTCACAGCTTGTCTGTAAGCGGA
TGCCGGGAGCAGACAAGCCCGTCAGGGCGCGTCAGCGGGTGTTGGCGGGTGTCG
GGGCTGGCTTAACTATGCGGCATCAGAGCAGATTGTACTGAGAGTGCACCATATCG
ACTACGTCGTAAGGCCGTTTCTGACAGAGTAAAATTCTTGAGGGAACTTTCACCAT
TATGGGAAATGCTTCAAGAAGGTATTGACTTAAACTCCATCAAATGGTCAGGTCAT
TGAGTGTTTTTTATTTGTTGTATTTTTTTTTTTTTAGAGAAAATCCTCCAATATCAAA
TTAGGAATCGTAGTTTCATGATTTTCTGTTACACCTAACTTTTTGTGTGGTGCCCTC
CTCCTTGTCAATATTAATGTTAAAGTGCAATTCTTTTTCCTTATCACGTTGAGCCATT
AGTATCAATTTGCTTACCTGTATTCCTTTACTATCCTCCTTTTTCTCCTTCTTGATAA
ATGTATGTAGATTGCGTATATAGTTTCGTCTACCCTATGAACATATTCCATTTTGTAAT
TTCGTGTCGTTTCTATTATGAATTTCATTTATAAAGTTTATGTACAAATATCATAAAA
AAAGAGAATCTTTTTAAGCAAGGATTTTCTTAACTTCTTCGGCGACAGCATCACCG
ACTTCGGTGGTACTGTTGGAACCACCTAAATCACCAGTTCTGATACCTGCATCCAA
AACCTTTTTAACTGCATCTTCAATGGCCTTACCTTCTTCAGGCAAGTTCAATGACA
ATTTCAACATCATTGCAGCAGACAAGATAGTGGCGATAGGGTCAACCTTATTCTTT
GGCAAATCTGGAGCAGAACCGTGGCATGGTTCGTACAAACCAAATGCGGTGTTCT
TGTCTGGCAAAGAGGCCAAGGACGCAGATGGCAACAAACCCAAGGAACCTGGGA
TAACGGAGGCTTCATCGGAGATGATATCACCAAACATGTTGCTGGTGATTATAATAC
CATTTAGGTGGGTTGGGTTCTTAACTAGGATCATGGCGGCAGAATCAATCAATTGA
TGTTGAACCTTCAATGTAGGGAATTCGTTCTTGATGGTTTCCTCCACAGTTTTTCTC
CATAATCTTGAAGAGGCCAAAAGATTAGCTTTATCCAAGGACCAAATAGGCAATGG
TGGCTCATGTTGTAGGGCCATGAAAGCGGCCATTCTTGTGATTCTTTGCACTTCTG
GAACGGTGTATTGTTCACTATCCCAAGCGACACCATCACCATCGTCTTCCTTTCTCT
TACCAAAGTAAATACCTCCCACTAATTCTCTGACAACAACGAAGTCAGTACCTTTA
GCAAATTGTGGCTTGATTGGAGATAAGTCTAAAAGAGAGTCGGATGCAAAGTTAC
ATGGTCTTAAGTTGGCGTACAATTGAAGTTCTTTACGGATTTTTAGTAAACCTTGTT
CAGGTCTAACACTACCGGTACCCCATTTAGGACCAGCCACAGCACCTAACAAAAC
GGCATCAACCTTCTTGGAGGCTTCCAGCGCCTCATCTGGAAGTGGGACACCTGTA
GCATCGATAGCAGCACCACCAATTAAATGATTTTCGAAATCGAACTTGACATTGGA
ACGAACATCAGAAATAGCTTTAAGAACCTTAATGGCTTCGGCTGTGATTTCTTGAC
CAACGTGGTCACCTGGCAAAACGACGATCTTCTTAGGGGCAGACATAGGGGCAG
ACATTAGAATGGTATATCCTTGAAATATATATATATATTGCTGAAATGTAAAAGGTAA
GAAAAGTTAGAAAGTAAGACGATTGCTAACCACCTATTGGAAAAAACAATAGGTC
CTTAAATAATATTGTCAACTTCAAGTATTGTGATGCAAGCATTTAGTCATGAACGCT
TCTCTATTCTATATGAAAAGCCGGTTCCGGCCTCTCACCTTTCCTTTTTCTCCCAATT
TTTCAGTTGAAAAAGGTATATGCGTCAGGCGACCTCTGAAATTAACAAAAAATTTC
CAGTCATCGAATTTGATTCTGTGCGATAGCGCCCCTGTGTGTTCTCGTTATGTTGAG
GAAAAAAATAATGGTTGCTAAGAGATTCGAACTCTTGCATCTTACGATACCTGAGT
ATTCCCACAGTTAACTGCGGTCAAGATATTTCTTGAATCAGGCGCCTTAGACCGCT
CGGCCAAACAACCAATTACTTGTTGAGAAATAGAGTATAATTATCCTATAAATATAA
CGTTTTTGAACACACATGAACAAGGAAGTACAGGACAATTGATTTTGAAGAGAAT
GTGGATTTTGATGTAATTGTTGGGATTCCATTTTTAATAAGGCAATAATATTAGGTAT
GTGGATATACTAGAAGTTCTCCTCGACCGTCGATATGCGGTGTGAAATACCGCACA
GATGCGTAAGGAGAAAATACCGCATCAGGAAATTGTAAACGTTAATATTTTGTTAA
AATTCGCGTTAAATTTTTGTTAAATCAGCTCATTTTTTAACCAATAGGCCGAAATCG
GCAAAATCCCTTATAAATCAAAAGAATAGACCGAGATAGGGTTGAGTGTTGTTCCA
GTTTGGAACAAGAGTCCACTATTAAAGAACGTGGACTCCAACGTCAAAGGGCGA
AAAACCGTCTATCAGGGCGATGGCCCACTACGTGAACCATCACCCTAATCAAGTTT
TTTGGGGTCGAGGTGCCGTAAAGCACTAAATCGGAACCCTAAAGGGAGCCCCCGA
TTTAGAGCTTGACGGGGAAAGCCGGCGAACGTGGCGAGAAAGGAAGGGAAGAA
AGCGAAAGGAGCGGGCGCTAGGGCGCTGGCAAGTGTAGCGGTCACGCTGCGCGT
AACCACCACACCCGCCGCGCTTAATGCGCCGCTACAGGGCGCGTCGCGCCATTCG
CCATTCAGGCTGCGCAACTGTTGGGAAGGGCGATCGGTGCGGGCCTCTTCGCTAT
TACGCCAGCTGGCGAAAGGGGGATGTGCTGCAAGGCGATTAAGTTGGGTAACGCC
AGGGTTTTCCCAGTCACGACGTTGTAAAACGACGGCCAGTGAGCGCGCGTAATAC
GACTCACTATAGGGCGAATTGGGTACCGGGCCCCCCCTCGAGGTCGACGGTATCG
ATAAGCTTGATATCGAATTCCTGCAGCCCGGGGGATCCGTTAGAATCATTTTGAATA
AAAAACACGCTTTTTCAGTTCGAGTTTATCATTATCAATACTGCCATTTCAAAGAAT
ACGTAAATAATTAATAGTAGTGATTTTCCTAACTTTATTTAGTCAAAAAATTAGCCTT
TTAATTCTGCTGTAACCCGTACATGCCCAAAATAGGGGGCGGGTTACACAGAATAT
ATAACATCGTAGGTGTCTGGGTGAACAGTTTATTCCTGGCATCCACTAAATATAATG
GAGCCCGCTTTTTAAGCTGGCATCCAGAAAAAAAAAGAATCCCAGCACCAAAATA
TTGTTTTCTTCACCAACCATCAGTTCATAGGTCCATTCTCTTAGCGCAACTACAGAG
AACAGGGGCACAAACAGGCAAAAAACGGGCACAACCTCAATGGAGTGATGCAA
CCTGCCTGGAGTAAATGATGACACAAGGCAATTGACCCACGCATGTATCTATCTCA
TTTTCTTACACCTTCTATTACCTTCTGCTCTCTCTGATTTGGAAAAAGCTGAAAAAA
AAGGTTGAAACCAGTTCCCTGAAATTATTCCCCTACTTGACTAATAAGTATATAAAG
ACGGTAGGTATTGATTGTAATTCTGTAAATCTATTTCTTAAACTTCTTAAATTCTACT
TTTATAGTTAGTCTTTTTTTTAGTTTTAAAACACCAAGAACTTAGTTTCGAATAAAC
ACACATAAACAAACAAAGAATTC
p425-GFP_−1fs_mCherry:
(SEQ ID NO: 732)
ATGTCTAAAGGTGAAGAATTATTCACTGGTGTTGTCCCAATTTTGGTTGAATTAGAT
GGTGATGTTAATGGTCACAAATTTTCTGTCTCCGGTGAAGGTGAAGGTGATGCTAC
TTACGGTAAATTGACCTTAAAATTTATTTGTACTACTGGTAAATTGCCAGTTCCATG
GCCAACCTTAGTCACTACTTTCGGTTATGGTGTTCAATGTTTTGCTAGATACCCAGA
TCATATGAAACAACATGACTTTTTCAAGTCTGCCATGCCAGAAGGTTATGTTCAAG
AAAGAACTATTTTTTTCAAAGATGACGGTAACTACAAGACCAGAGCTGAAGTCAA
GTTTGAAGGTGATACCTTAGTTAATAGAATCGAATTAAAAGGTATTGATTTTAAAGA
AGATGGTAACATTTTAGGTCACAAATTGGAATACAACTATAACTCTCACAATGTTTA
CATCATGGCTGACAAACAAAAGAATGGTATCAAAGTTAACTTCAAAATTAGACAC
AACATTGAAGATGGTTCTGTTCAATTAGCTGACCATTATCAACAAAATACTCCAATT
GGTGATGGTCCAGTCTTGTTACCAGACAACCATTACTTATCCACTCAATCTGCCTTA
TCCAAAGATCCAAACGAAAAGAGAGACCACATGGTCTTGTTAGAATTTGTTACTG
CTGCTGGTATTACCCATGGTATGGATGAATTGTACAAAGCTAGCAAACCTGGGTCA
ATCCTTGGGGCCCAGACTGAGCACGTGATGGCAGAGCACAGGACGTCATGGTTT
CAAAAGGTGAAGAAGATAATATGGCTATTATTAAAGAATTTATGAGATTTAAAGTTCATATG
GAAGGTTCAGTTAATGGTCATGAATTTGAAATTGAAGGTGAAGGTGAAGGTAGACCATAT
GAAGGTACTCAAACTGCTAAATTGAAAGTTACTAAAGGTGGTCCATTACCATTTGCTTGG
GATATTTTGTCACCACAATTTATGTATGGTTCAAAAGCTTATGTTAAACATCCAGCTGATAT
TCCAGATTATTTAAAATTGTCATTTCCAGAAGGTTTTAAATGGGAAAGAGTTATGAATTTT
GAAGATGGTGGTGTTGTTACTGTTACTCAAGATTCATCATTACAAGATGGTGAATTTATTT
ATAAAGTTAAATTGAGAGGTACTAATTTTCCATCAGATGGTCCAGTTATGCAAAAAAAAAC
TATGGGTTGGGAAGCTTCATCAGAAAGAATGTATCCAGAAGATGGTGCTTTAAAAGGTG
AAATTAAACAAAGATTGAAATTAAAAGATGGTGGTCATTATGATGCTGAAGTTAAAACTAC
TTATAAAGCTAAAAAACCAGTTCAATTACCAGGTGCTTATAATGTTAATATTAAATTGGATAT
TACTTCACATAATGAAGATTATACTATTGTTGAACAATATGAAAGAGCTGAAGGTAGACAT
TCAACTGGTGGTATGGATGAATTATATAAAGGTACCGCTCGAGCAGCTGTGATTGATTGA
GTCGACTTGGTTGAACACGTTGCCAAGGCTTAAGTGAATTTACTTTAAATCTTGCA
TTTAAATAAATTTTCTTTTTATAGCTTTATGACTTAGTTTCAATTTATATACTATTTTA
ATGACATTTTCGATTCGGATCCACTAGTTCTAGAGCGGCCGCCACCGCGGTGGAGC
TCCAGCTTTTGTTCCCTTTAGTGAGGGTTAATTGCGCGCTTGGCGTAATCATGGTCA
TAGCTGTTTCCTGTGTGAAATTGTTATCCGCTCACAATTCCACACAACATAGGAGC
CGGAAGCATAAAGTGTAAAGCCTGGGGTGCCTAATGAGTGAGGTAACTCACATTA
ATTGCGTTGCGCTCACTGCCCGCTTTCCAGTCGGGAAACCTGTCGTGCCAGCTGC
ATTAATGAATCGGCCAACGCGCGGGGAGAGGCGGTTTGCGTATTGGGCGCTCTTC
CGCTTCCTCGCTCACTGACTCGCTGCGCTCGGTCGTTCGGCTGCGGCGAGCGGTAT
CAGCTCACTCAAAGGCGGTAATACGGTTATCCACAGAATCAGGGGATAACGCAGG
AAAGAACATGTGAGCAAAAGGCCAGCAAAAGGCCAGGAACCGTAAAAAGGCCG
CGTTGCTGGCGTTTTTCCATAGGCTCCGCCCCCCTGACGAGCATCACAAAAATCGA
CGCTCAAGTCAGAGGTGGCGAAACCCGACAGGACTATAAAGATACCAGGCGTTTC
CCCCTGGAAGCTCCCTCGTGCGCTCTCCTGTTCCGACCCTGCCGCTTACCGGATAC
CTGTCCGCCTTTCTCCCTTCGGGAAGCGTGGCGCTTTCTCATAGCTCACGCTGTAG
GTATCTCAGTTCGGTGTAGGTCGTTCGCTCCAAGCTGGGCTGTGTGCACGAACCC
CCCGTTCAGCCCGACCGCTGCGCCTTATCCGGTAACTATCGTCTTGAGTCCAACCC
GGTAAGACACGACTTATCGCCACTGGCAGCAGCCACTGGTAACAGGATTAGCAGA
GCGAGGTATGTAGGCGGTGCTACAGAGTTCTTGAAGTGGTGGCCTAACTACGGCT
ACACTAGAAGGACAGTATTTGGTATCTGCGCTCTGCTGAAGCCAGTTACCTTCGGA
AAAAGAGTTGGTAGCTCTTGATCCGGCAAACAAACCACCGCTGGTAGCGGTGGTT
TTTTTGTTTGCAAGCAGCAGATTACGCGCAGAAAAAAAGGATCTCAAGAAGATCC
TTTGATCTTTTCTACGGGGTCTGACGCTCAGTGGAACGAAAACTCACGTTAAGGG
ATTTTGGTCATGAGATTATCAAAAAGGATCTTCACCTAGATCCTTTTAAATTAAAAA
TGAAGTTTTAAATCAATCTAAAGTATATATGAGTAAACTTGGTCTGACAGTTACCAA
TGCTTAATCAGTGAGGCACCTATCTCAGCGATCTGTCTATTTCGTTCATCCATAGTT
GCCTGACTCCCCGTCGTGTAGATAACTACGATACGGGAGGGCTTACCATCTGGCCC
CAGTGCTGCAATGATACCGCGAGACCCACGCTCACCGGCTCCAGATTTATCAGCA
ATAAACCAGCCAGCCGGAAGGGCCGAGCGCAGAAGTGGTCCTGCAACTTTATCCG
CCTCCATCCAGTCTATTAATTGTTGCCGGGAAGCTAGAGTAAGTAGTTCGCCAGTT
AATAGTTTGCGCAACGTTGTTGCCATTGCTACAGGCATCGTGGTGTCACGCTCGTC
GTTTGGTATGGCTTCATTCAGCTCCGGTTCCCAACGATCAAGGCGAGTTACATGAT
CCCCCATGTTGTGCAAAAAAGCGGTTAGCTCCTTCGGTCCTCCGATCGTTGTCAGA
AGTAAGTTGGCCGCAGTGTTATCACTCATGGTTATGGCAGCACTGCATAATTCTCTT
ACTGTCATGCCATCCGTAAGATGCTTTTCTGTGACTGGTGAGTACTCAACCAAGTC
ATTCTGAGAATAGTGTATGCGGCGACCGAGTTGCTCTTGCCCGGCGTCAATACGGG
ATAATACCGCGCCACATAGCAGAACTTTAAAAGTGCTCATCATTGGAAAACGTTCT
TCGGGGCGAAAACTCTCAAGGATCTTACCGCTGTTGAGATCCAGTTCGATGTAAC
CCACTCGTGCACCCAACTGATCTTCAGCATCTTTTACTTTCACCAGCGTTTCTGGG
TGAGCAAAAACAGGAAGGCAAAATGCCGCAAAAAAGGGAATAAGGGCGACACG
GAAATGTTGAATACTCATACTCTTCCTTTTTCAATATTATTGAAGCATTTATCAGGGT
TATTGTCTCATGAGCGGATACATATTTGAATGTATTTAGAAAAATAAACAAATAGGG
GTTCCGCGCACATTTCCCCGAAAAGTGCCACCTGAACGAAGCATCTGTGCTTCATT
TTGTAGAACAAAAATGCAACGCGAGAGCGCTAATTTTTCAAACAAAGAATCTGAG
CTGCATTTTTACAGAACAGAAATGCAACGCGAAAGCGCTATTTTACCAACGAAGA
ATCTGTGCTTCATTTTTGTAAAACAAAAATGCAACGCGAGAGCGCTAATTTTTCAA
ACAAAGAATCTGAGCTGCATTTTTACAGAACAGAAATGCAACGCGAGAGCGCTAT
TTTACCAACAAAGAATCTATACTTCTTTTTTGTTCTACAAAAATGCATCCCGAGAGC
GCTATTTTTCTAACAAAGCATCTTAGATTACTTTTTTTCTCCTTTGTGCGCTCTATAA
TGCAGTCTCTTGATAACTTTTTGCACTGTAGGTCCGTTAAGGTTAGAAGAAGGCTA
CTTTGGTGTCTATTTTCTCTTCCATAAAAAAAGCCTGACTCCACTTCCCGCGTTTAC
TGATTACTAGCGAAGCTGCGGGTGCATTTTTTCAAGATAAAGGCATCCCCGATTATA
TTCTATACCGATGTGGATTGCGCATACTTTGTGAACAGAAAGTGATAGCGTTGATG
ATTCTTCATTGGTCAGAAAATTATGAACGGTTTCTTCTATTTTGTCTCTATATACTAC
GTATAGGAAATGTTTACATTTTCGTATTGTTTTCGATTCACTCTATGAATAGTTCTTA
CTACAATTTTTTTGTCTAAAGAGTAATACTAGAGATAAACATAAAAAATGTAGAGG
TCGAGTTTAGATGCAAGTTCAAGGAGCGAAAGGTGGATGGGTAGGTTATATAGGG
ATATAGCACAGAGATATATAGCAAAGAGATACTTTTGAGCAATGTTTGTGGAAGCG
GTATTCGCAATATTTTAGTAGCTCGTTACAGTCCGGTGCGTTTTTGGTTTTTTGAAA
GTGCGTCTTCAGAGCGCTTTTGGTTTTCAAAAGCGCTCTGAAGTTCCTATACTTTC
TAGAGAATAGGAACTTCGGAATAGGAACTTCAAAGCGTTTCCGAAAACGAGCGCT
TCCGAAAATGCAACGCGAGCTGCGCACATACAGCTCACTGTTCACGTCGCACCTA
TATCTGCGTGTTGCCTGTATATATATATACATGAGAAGAACGGCATAGTGCGTGTTTA
TGCTTAAATGCGTACTTATATGCGTCTATTTATGTAGGATGAAAGGTAGTCTAGTAC
CTCCTGTGATATTATCCCATTCCATGCGGGGTATCGTATGCTTCCTTCAGCACTACCC
TTTAGCTGTTCTATATGCTGCCACTCCTCAATTGGATTAGTCTCATCCTTCAATGCTA
TCATTTCCTTTGATATTGGATCATACTAAGAAACCATTATTATCATGACATTAACCTA
TAAAAATAGGCGTATCACGAGGCCCTTTCGTCTCGCGCGTTTCGGTGATGACGGTG
AAAACCTCTGACACATGCAGCTCCCGGAGACGGTCACAGCTTGTCTGTAAGCGGA
TGCCGGGAGCAGACAAGCCCGTCAGGGCGCGTCAGCGGGTGTTGGCGGGTGTCG
GGGCTGGCTTAACTATGCGGCATCAGAGCAGATTGTACTGAGAGTGCACCATATCG
ACTACGTCGTAAGGCCGTTTCTGACAGAGTAAAATTCTTGAGGGAACTTTCACCAT
TATGGGAAATGCTTCAAGAAGGTATTGACTTAAACTCCATCAAATGGTCAGGTCAT
TGAGTGTTTTTTATTTGTTGTATTTTTTTTTTTTTAGAGAAAATCCTCCAATATCAAA
TTAGGAATCGTAGTTTCATGATTTTCTGTTACACCTAACTTTTTGTGTGGTGCCCTC
CTCCTTGTCAATATTAATGTTAAAGTGCAATTCTTTTTCCTTATCACGTTGAGCCATT
AGTATCAATTTGCTTACCTGTATTCCTTTACTATCCTCCTTTTTCTCCTTCTTGATAA
ATGTATGTAGATTGCGTATATAGTTTCGTCTACCCTATGAACATATTCCATTTTGTAAT
TTCGTGTCGTTTCTATTATGAATTTCATTTATAAAGTTTATGTACAAATATCATAAAA
AAAGAGAATCTTTTTAAGCAAGGATTTTCTTAACTTCTTCGGCGACAGCATCACCG
ACTTCGGTGGTACTGTTGGAACCACCTAAATCACCAGTTCTGATACCTGCATCCAA
AACCTTTTTAACTGCATCTTCAATGGCCTTACCTTCTTCAGGCAAGTTCAATGACA
ATTTCAACATCATTGCAGCAGACAAGATAGTGGCGATAGGGTCAACCTTATTCTTT
GGCAAATCTGGAGCAGAACCGTGGCATGGTTCGTACAAACCAAATGCGGTGTTCT
TGTCTGGCAAAGAGGCCAAGGACGCAGATGGCAACAAACCCAAGGAACCTGGGA
TAACGGAGGCTTCATCGGAGATGATATCACCAAACATGTTGCTGGTGATTATAATAC
CATTTAGGTGGGTTGGGTTCTTAACTAGGATCATGGCGGCAGAATCAATCAATTGA
TGTTGAACCTTCAATGTAGGGAATTCGTTCTTGATGGTTTCCTCCACAGTTTTTCTC
CATAATCTTGAAGAGGCCAAAAGATTAGCTTTATCCAAGGACCAAATAGGCAATGG
TGGCTCATGTTGTAGGGCCATGAAAGCGGCCATTCTTGTGATTCTTTGCACTTCTG
GAACGGTGTATTGTTCACTATCCCAAGCGACACCATCACCATCGTCTTCCTTTCTCT
TACCAAAGTAAATACCTCCCACTAATTCTCTGACAACAACGAAGTCAGTACCTTTA
GCAAATTGTGGCTTGATTGGAGATAAGTCTAAAAGAGAGTCGGATGCAAAGTTAC
ATGGTCTTAAGTTGGCGTACAATTGAAGTTCTTTACGGATTTTTAGTAAACCTTGTT
CAGGTCTAACACTACCGGTACCCCATTTAGGACCAGCCACAGCACCTAACAAAAC
GGCATCAACCTTCTTGGAGGCTTCCAGCGCCTCATCTGGAAGTGGGACACCTGTA
GCATCGATAGCAGCACCACCAATTAAATGATTTTCGAAATCGAACTTGACATTGGA
ACGAACATCAGAAATAGCTTTAAGAACCTTAATGGCTTCGGCTGTGATTTCTTGAC
CAACGTGGTCACCTGGCAAAACGACGATCTTCTTAGGGGCAGACATAGGGGCAG
ACATTAGAATGGTATATCCTTGAAATATATATATATATTGCTGAAATGTAAAAGGTAA
GAAAAGTTAGAAAGTAAGACGATTGCTAACCACCTATTGGAAAAAACAATAGGTC
CTTAAATAATATTGTCAACTTCAAGTATTGTGATGCAAGCATTTAGTCATGAACGCT
TCTCTATTCTATATGAAAAGCCGGTTCCGGCCTCTCACCTTTCCTTTTTCTCCCAATT
TTTCAGTTGAAAAAGGTATATGCGTCAGGCGACCTCTGAAATTAACAAAAAATTTC
CAGTCATCGAATTTGATTCTGTGCGATAGCGCCCCTGTGTGTTCTCGTTATGTTGAG
GAAAAAAATAATGGTTGCTAAGAGATTCGAACTCTTGCATCTTACGATACCTGAGT
ATTCCCACAGTTAACTGCGGTCAAGATATTTCTTGAATCAGGCGCCTTAGACCGCT
CGGCCAAACAACCAATTACTTGTTGAGAAATAGAGTATAATTATCCTATAAATATAA
CGTTTTTGAACACACATGAACAAGGAAGTACAGGACAATTGATTTTGAAGAGAAT
GTGGATTTTGATGTAATTGTTGGGATTCCATTTTTAATAAGGCAATAATATTAGGTAT
GTGGATATACTAGAAGTTCTCCTCGACCGTCGATATGCGGTGTGAAATACCGCACA
GATGCGTAAGGAGAAAATACCGCATCAGGAAATTGTAAACGTTAATATTTTGTTAA
AATTCGCGTTAAATTTTTGTTAAATCAGCTCATTTTTTAACCAATAGGCCGAAATCG
GCAAAATCCCTTATAAATCAAAAGAATAGACCGAGATAGGGTTGAGTGTTGTTCCA
GTTTGGAACAAGAGTCCACTATTAAAGAACGTGGACTCCAACGTCAAAGGGCGA
AAAACCGTCTATCAGGGCGATGGCCCACTACGTGAACCATCACCCTAATCAAGTTT
TTTGGGGTCGAGGTGCCGTAAAGCACTAAATCGGAACCCTAAAGGGAGCCCCCGA
TTTAGAGCTTGACGGGGAAAGCCGGCGAACGTGGCGAGAAAGGAAGGGAAGAA
AGCGAAAGGAGCGGGCGCTAGGGCGCTGGCAAGTGTAGCGGTCACGCTGCGCGT
AACCACCACACCCGCCGCGCTTAATGCGCCGCTACAGGGCGCGTCGCGCCATTCG
CCATTCAGGCTGCGCAACTGTTGGGAAGGGCGATCGGTGCGGGCCTCTTCGCTAT
TACGCCAGCTGGCGAAAGGGGGATGTGCTGCAAGGCGATTAAGTTGGGTAACGCC
AGGGTTTTCCCAGTCACGACGTTGTAAAACGACGGCCAGTGAGCGCGCGTAATAC
GACTCACTATAGGGCGAATTGGGTACCGGGCCCCCCCTCGAGGTCGACGGTATCG
ATAAGCTTGATATCGAATTCCTGCAGCCCGGGGGATCCGTTAGAATCATTTTGAATA
AAAAACACGCTTTTTCAGTTCGAGTTTATCATTATCAATACTGCCATTTCAAAGAAT
ACGTAAATAATTAATAGTAGTGATTTTCCTAACTTTATTTAGTCAAAAAATTAGCCTT
TTAATTCTGCTGTAACCCGTACATGCCCAAAATAGGGGGCGGGTTACACAGAATAT
ATAACATCGTAGGTGTCTGGGTGAACAGTTTATTCCTGGCATCCACTAAATATAATG
GAGCCCGCTTTTTAAGCTGGCATCCAGAAAAAAAAAGAATCCCAGCACCAAAATA
TTGTTTTCTTCACCAACCATCAGTTCATAGGTCCATTCTCTTAGCGCAACTACAGAG
AACAGGGGCACAAACAGGCAAAAAACGGGCACAACCTCAATGGAGTGATGCAA
CCTGCCTGGAGTAAATGATGACACAAGGCAATTGACCCACGCATGTATCTATCTCA
TTTTCTTACACCTTCTATTACCTTCTGCTCTCTCTGATTTGGAAAAAGCTGAAAAAA
AAGGTTGAAACCAGTTCCCTGAAATTATTCCCCTACTTGACTAATAAGTATATAAAG
ACGGTAGGTATTGATTGTAATTCTGTAAATCTATTTCTTAAACTTCTTAAATTCTACT
TTTATAGTTAGTCTTTTTTTTAGTTTTAAAACACCAAGAACTTAGTTTCGAATAAAC
ACACATAAACAAACAAAGAATTC
KEY:
GFP open reading frame
Linker containing stop codon +1 frameshift, or −1 frameshift
mCherry open reading frame
Plasmid backbone (containing the GPD promoter, Leu2 marker, and AmpR)
Protospacer (underlined)
PAM (boldfaced)

[1439] DNA sequences of mammalian prime editor plasmids and example PEgRNA plasmid

pCMV-PE1:
(SEQ ID NO: 733)
ATGAAACGGACAGCCGACGGAAGCGAGTTCGAGTCACCAAAGAAGAAGCGGAA
AGTCGACAAGAAGTACAGCATCGGCCTGGACATCGGCACCAACTCTGTGGGCTGG
GCCGTGATCACCGACGAGTACAAGGTGCCCAGCAAGAAATTCAAGGTGCTGGGC
AACACCGACCGGCACAGCATCAAGAAGAACCTGATCGGAGCCCTGCTGTTCGAC
AGCGGCGAAACAGCCGAGGCCACCCGGCTGAAGAGAACCGCCAGAAGAAGATA
CACCAGACGGAAGAACCGGATCTGCTATCTGCAAGAGATCTTCAGCAACGAGATG
GCCAAGGTGGACGACAGCTTCTTCCACAGACTGGAAGAGTCCTTCCTGGTGGAA
GAGGATAAGAAGCACGAGCGGCACCCCATCTTCGGCAACATCGTGGACGAGGTG
GCCTACCACGAGAAGTACCCCACCATCTACCACCTGAGAAAGAAACTGGTGGACA
GCACCGACAAGGCCGACCTGCGGCTGATCTATCTGGCCCTGGCCCACATGATCAA
GTTCCGGGGCCACTTCCTGATCGAGGGCGACCTGAACCCCGACAACAGCGACGT
GGACAAGCTGTTCATCCAGCTGGTGCAGACCTACAACCAGCTGTTCGAGGAAAAC
CCCATCAACGCCAGCGGCGTGGACGCCAAGGCCATCCTGTCTGCCAGACTGAGCA
AGAGCAGACGGCTGGAAAATCTGATCGCCCAGCTGCCCGGCGAGAAGAAGAATG
GCCTGTTCGGAAACCTGATTGCCCTGAGCCTGGGCCTGACCCCCAACTTCAAGAG
CAACTTCGACCTGGCCGAGGATGCCAAACTGCAGCTGAGCAAGGACACCTACGA
CGACGACCTGGACAACCTGCTGGCCCAGATCGGCGACCAGTACGCCGACCTGTTT
CTGGCCGCCAAGAACCTGTCCGACGCCATCCTGCTGAGCGACATCCTGAGAGTGA
ACACCGAGATCACCAAGGCCCCCCTGAGCGCCTCTATGATCAAGAGATACGACGA
GCACCACCAGGACCTGACCCTGCTGAAAGCTCTCGTGCGGCAGCAGCTGCCTGA
GAAGTACAAAGAGATTTTCTTCGACCAGAGCAAGAACGGCTACGCCGGCTACATT
GACGGCGGAGCCAGCCAGGAAGAGTTCTACAAGTTCATCAAGCCCATCCTGGAA
AAGATGGACGGCACCGAGGAACTGCTCGTGAAGCTGAACAGAGAGGACCTGCTG
CGGAAGCAGCGGACCTTCGACAACGGCAGCATCCCCCACCAGATCCACCTGGGA
GAGCTGCACGCCATTCTGCGGCGGCAGGAAGATTTTTACCCATTCCTGAAGGACA
ACCGGGAAAAGATCGAGAAGATCCTGACCTTCCGCATCCCCTACTACGTGGGCCC
TCTGGCCAGGGGAAACAGCAGATTCGCCTGGATGACCAGAAAGAGCGAGGAAAC
CATCACCCCCTGGAACTTCGAGGAAGTGGTGGACAAGGGCGCTTCCGCCCAGAG
CTTCATCGAGCGGATGACCAACTTCGATAAGAACCTGCCCAACGAGAAGGTGCTG
CCCAAGCACAGCCTGCTGTACGAGTACTTCACCGTGTATAACGAGCTGACCAAAG
TGAAATACGTGACCGAGGGAATGAGAAAGCCCGCCTTCCTGAGCGGCGAGCAGA
AAAAGGCCATCGTGGACCTGCTGTTCAAGACCAACCGGAAAGTGACCGTGAAGC
AGCTGAAAGAGGACTACTTCAAGAAAATCGAGTGCTTCGACTCCGTGGAAATCTC
CGGCGTGGAAGATCGGTTCAACGCCTCCCTGGGCACATACCACGATCTGCTGAAA
ATTATCAAGGACAAGGACTTCCTGGACAATGAGGAAAACGAGGACATTCTGGAAG
ATATCGTGCTGACCCTGACACTGTTTGAGGACAGAGAGATGATCGAGGAACGGCT
GAAAACCTATGCCCACCTGTTCGACGACAAAGTGATGAAGCAGCTGAAGCGGCG
GAGATACACCGGCTGGGGCAGGCTGAGCCGGAAGCTGATCAACGGCATCCGGGA
CAAGCAGTCCGGCAAGACAATCCTGGATTTCCTGAAGTCCGACGGCTTCGCCAAC
AGAAACTTCATGCAGCTGATCCACGACGACAGCCTGACCTTTAAAGAGGACATCC
AGAAAGCCCAGGTGTCCGGCCAGGGCGATAGCCTGCACGAGCACATTGCCAATCT
GGCCGGCAGCCCCGCCATTAAGAAGGGCATCCTGCAGACAGTGAAGGTGGTGGA
CGAGCTCGTGAAAGTGATGGGCCGGCACAAGCCCGAGAACATCGTGATCGAAAT
GGCCAGAGAGAACCAGACCACCCAGAAGGGACAGAAGAACAGCCGCGAGAGAA
TGAAGCGGATCGAAGAGGGCATCAAAGAGCTGGGCAGCCAGATCCTGAAAGAAC
ACCCCGTGGAAAACACCCAGCTGCAGAACGAGAAGCTGTACCTGTACTACCTGCA
GAATGGGCGGGATATGTACGTGGACCAGGAACTGGACATCAACCGGCTGTCCGAC
TACGATGTGGACGCTATCGTGCCTCAGAGCTTTCTGAAGGACGACTCCATCGACA
ACAAGGTGCTGACCAGAAGCGACAAGAACCGGGGCAAGAGCGACAACGTGCCC
TCCGAAGAGGTCGTGAAGAAGATGAAGAACTACTGGCGGCAGCTGCTGAACGCC
AAGCTGATTACCCAGAGAAAGTTCGACAATCTGACCAAGGCCGAGAGAGGCGGC
CTGAGCGAACTGGATAAGGCCGGCTTCATCAAGAGACAGCTGGTGGAAACCCGG
CAGATCACAAAGCACGTGGCACAGATCCTGGACTCCCGGATGAACACTAAGTACG
ACGAGAATGACAAGCTGATCCGGGAAGTGAAAGTGATCACCCTGAAGTCCAAGC
TGGTGTCCGATTTCCGGAAGGATTTCCAGTTTTACAAAGTGCGCGAGATCAACAA
CTACCACCACGCCCACGACGCCTACCTGAACGCCGTCGTGGGAACCGCCCTGATC
AAAAAGTACCCTAAGCTGGAAAGCGAGTTCGTGTACGGCGACTACAAGGTGTACG
ACGTGCGGAAGATGATCGCCAAGAGCGAGCAGGAAATCGGCAAGGCTACCGCCA
AGTACTTCTTCTACAGCAACATCATGAACTTTTTCAAGACCGAGATTACCCTGGCC
AACGGCGAGATCCGGAAGCGGCCTCTGATCGAGACAAACGGCGAAACCGGGGAG
ATCGTGTGGGATAAGGGCCGGGATTTTGCCACCGTGCGGAAAGTGCTGAGCATGC
CCCAAGTGAATATCGTGAAAAAGACCGAGGTGCAGACAGGCGGCTTCAGCAAAG
AGTCTATCCTGCCCAAGAGGAACAGCGATAAGCTGATCGCCAGAAAGAAGGACT
GGGACCCTAAGAAGTACGGCGGCTTCGACAGCCCCACCGTGGCCTATTCTGTGCT
GGTGGTGGCCAAAGTGGAAAAGGGCAAGTCCAAGAAACTGAAGAGTGTGAAAG
AGCTGCTGGGGATCACCATCATGGAAAGAAGCAGCTTCGAGAAGAATCCCATCGA
CTTTCTGGAAGCCAAGGGCTACAAAGAAGTGAAAAAGGACCTGATCATCAAGCT
GCCTAAGTACTCCCTGTTCGAGCTGGAAAACGGCCGGAAGAGAATGCTGGCCTCT
GCCGGCGAACTGCAGAAGGGAAACGAACTGGCCCTGCCCTCCAAATATGTGAAC
TTCCTGTACCTGGCCAGCCACTATGAGAAGCTGAAGGGCTCCCCCGAGGATAATG
AGCAGAAACAGCTGTTTGTGGAACAGCACAAGCACTACCTGGACGAGATCATCG
AGCAGATCAGCGAGTTCTCCAAGAGAGTGATCCTGGCCGACGCTAATCTGGACAA
AGTGCTGTCCGCCTACAACAAGCACCGGGATAAGCCCATCAGAGAGCAGGCCGA
GAATATCATCCACCTGTTTACCCTGACCAATCTGGGAGCCCCTGCCGCCTTCAAGT
ACTTTGACACCACCATCGACCGGAAGAGGTACACCAGCACCAAAGAGGTGCTGG
ACGCCACCCTGATCCACCAGAGCATCACCGGCCTGTACGAGACACGGATCGACCT
GTCTCAGCTGGGAGGTGACTCTGGAGGATCTAGCGGAGGATCCTCTGGCAGCGAGA
CACCAGGAACAAGCGAGTCAGCAACACCAGAGAGCAGTGGCGGCAGCAGCGGCGGC
AGCAGCACCCTAAATATAGAAGATGAGTATCGGCTACATGAGACCTCAAAAGA
GCCAGATGTTTCTCTAGGGTCCACATGGCTGTCTGATTTTCCTCAGGCCTGG
GCGGAAACCGGGGGCATGGGACTGGCAGTTCGCCAAGCTCCTCTGATCATA
CCTCTGAAAGCAACCTCTACCCCCGTGTCCATAAAACAATACCCCATGTCACA
AGAAGCCAGACTGGGGATCAAGCCCCACATACAGAGACTGTTGGACCAGGG
AATACTGGTACCCTGCCAGTCCCCCTGGAACACGCCCCTGCTACCCGTTAAG
AAACCAGGGACTAATGATTATAGGCCTGTCCAGGATCTGAGAGAAGTCAACA
AGCGGGTGGAAGACATCCACCCCACCGTGCCCAACCCTTACAACCTCTTGAG
CGGGCTCCCACCGTCCCACCAGTGGTACACTGTGCTTGATTTAAAGGATGCC
TTTTTCTGCCTGAGACTCCACCCCACCAGTCAGCCTCTCTTCGCCTTTGAGT
GGAGAGATCCAGAGATGGGAATCTCAGGACAATTGACCTGGACCAGACTCC
CACAGGGTTTCAAAAACAGTCCCACCCTGTTTGATGAGGCACTGCACAGAGA
CCTAGCAGACTTCCGGATCCAGCACCCAGACTTGATCCTGCTACAGTACGTG
GATGACTTACTGCTGGCCGCCACTTCTGAGCTAGACTGCCAACAAGGTACTC
GGGCCCTGTTACAAACCCTAGGGAACCTCGGGTATCGGGCCTCGGCCAAGA
AAGCCCAAATTTGCCAGAAACAGGTCAAGTATCTGGGGTATCTTCTAAAAGA
GGGTCAGAGATGGCTGACTGAGGCCAGAAAAGAGACTGTGATGGGGCAGCC
TACTCCGAAGACCCCTCGACAACTAAGGGAGTTCCTAGGGACGGCAGGCTT
CTGTCGCCTCTGGATCCCTGGGTTTGCAGAAATGGCAGCCCCCCTGTACCCT
CTCACCAAAACGGGGACTCTGTTTAATTGGGGCCCAGACCAACAAAAGGCCT
ATCAAGAAATCAAGCAAGCTCTTCTAACTGCCCCAGCCCTGGGGTTGCCAGA
TTTGACTAAGCCCTTTGAACTCTTTGTCGACGAGAAGCAGGGCTACGCCAAA
GGTGTCCTAACGCAAAAACTGGGACCTTGGCGTCGGCCGGTGGCCTACCTG
TCCAAAAAGCTAGACCCAGTAGCAGCTGGGTGGCCCCCTTGCCTACGGATGG
TAGCAGCCATTGCCGTACTGACAAAGGATGCAGGCAAGCTAACCATGGGACA
GCCACTAGTCATTCTGGCCCCCCATGCAGTAGAGGCACTAGTCAAACAACCC
CCCGACCGCTGGCTTTCCAACGCCCGGATGACTCACTATCAGGCCTTGCTTT
TGGACACGGACCGGGTCCAGTTCGGACCGGTGGTAGCCCTGAACCCGGCTA
CGCTGCTCCCACTGCCTGAGGAAGGGCTGCAACACAACTGCCTTGATATCCT
GGCCGAAGCCCACGGAACCCGACCCGACCTAACGGACCAGCCGCTCCCAGA
CGCCGACCACACCTGGTACACGGATGGAAGCAGTCTCTTACAAGAGGGACA
GCGTAAGGCGGGAGCTGCGGTGACCACCGAGACCGAGGTAATCTGGGCTAA
AGCCCTGCCAGCCGGGACATCCGCTCAGCGGGCTGAACTGATAGCACTCAC
CCAGGCCCTAAAGATGGCAGAAGGTAAGAAGCTAAATGTTTATACTGATAGC
CGTTATGCTTTTGCTACTGCCCATATCCATGGAGAAATATACAGAAGGCGTGG
GTTGCTCACATCAGAAGGCAAAGAGATCAAAAATAAAGACGAGATCTTGGCC
CTACTAAAAGCCCTCTTTCTGCCCAAAAGACTTAGCATAATCCATTGTCCAGG
ACATCAAAAGGGACACAGCGCCGAGGCTAGAGGCAACCGGATGGCTGACCA
AGCGGCCCGAAAGGCAGCCATCACAGAGACTCCAGACACCTCTACCCTCCT
CATAGAAAATTCATCACCCTCTGGCGGCTCAAAAAGAACCGCCGACGGCAGC
GAATTCGAGCCCAAGAAGAAGAGGAAAGTCTAACCGGTCATCATCACCATCAC
CATTGAGTTTAAACCCGCTGATCAGCCTCGACTGTGCCTTCTAGTTGCCAGCCATC
TGTTGTTTGCCCCTCCCCCGTGCCTTCCTTGACCCTGGAAGGTGCCACTCCCACTG
TCCTTTCCTAATAAAATGAGAAAATTGCATCGCATTGTCTGAGTAGGTGTCATTCTA
TTCTGGGGGGTGGGGTGGGGCAGGACAGCAAGGGGGAGGATTGGGAAGACAATA
GCAGGCATGCTGGGGATGCGGTGGGCTCTATGGCTTCTGAGGCGGAAAGAACCAG
CTGGGGCTCGATACCGTCGACCTCTAGCTAGAGCTTGGCGTAATCATGGTCATAGC
TGTTTCCTGTGTGAAATTGTTATCCGCTCACAATTCCACACAACATACGAGCCGGA
AGCATAAAGTGTAAAGCCTAGGGTGCCTAATGAGTGAGCTAACTCACATTAATTGC
GTTGCGCTCACTGCCCGCTTTCCAGTCGGGAAACCTGTCGTGCCAGCTGCATTAAT
GAATCGGCCAACGCGCGGGGAGAGGCGGTTTGCGTATTGGGCGCTCTTCCGCTTC
CTCGCTCACTGACTCGCTGCGCTCGGTCGTTCGGCTGCGGCGAGCGGTATCAGCT
CACTCAAAGGCGGTAATACGGTTATCCACAGAATCAGGGGATAACGCAGGAAAGA
ACATGTGAGCAAAAGGCCAGCAAAAGGCCAGGAACCGTAAAAAGGCCGCGTTGC
TGGCGTTTTTCCATAGGCTCCGCCCCCCTGACGAGCATCACAAAAATCGACGCTCA
AGTCAGAGGTGGCGAAACCCGACAGGACTATAAAGATACCAGGCGTTTCCCCCTG
GAAGCTCCCTCGTGCGCTCTCCTGTTCCGACCCTGCCGCTTACCGGATACCTGTCC
GCCTTTCTCCCTTCGGGAAGCGTGGCGCTTTCTCATAGCTCACGCTGTAGGTATCT
CAGTTCGGTGTAGGTCGTTCGCTCCAAGCTGGGCTGTGTGCACGAACCCCCCGTT
CAGCCCGACCGCTGCGCCTTATCCGGTAACTATCGTCTTGAGTCCAACCCGGTAAG
ACACGACTTATCGCCACTGGCAGCAGCCACTGGTAACAGGATTAGCAGAGCGAGG
TATGTAGGCGGTGCTACAGAGTTCTTGAAGTGGTGGCCTAACTACGGCTACACTAG
AAGAACAGTATTTGGTATCTGCGCTCTGCTGAAGCCAGTTACCTTCGGAAAAAGA
GTTGGTAGCTCTTGATCCGGCAAACAAACCACCGCTGGTAGCGGTGGTTTTTTTGT
TTGCAAGCAGCAGATTACGCGCAGAAAAAAAGGATCTCAAGAAGATCCTTTGATC
TTTTCTACGGGGTCTGACGCTCAGTGGAACGAAAACTCACGTTAAGGGATTTTGG
TCATGAGATTATCAAAAAGGATCTTCACCTAGATCCTTTTAAATTAAAAATGAAGTT
TTAAATCAATCTAAAGTATATATGAGTAAACTTGGTCTGACAGTTACCAATGCTTAA
TCAGTGAGGCACCTATCTCAGCGATCTGTCTATTTCGTTCATCCATAGTTGCCTGAC
TCCCCGTCGTGTAGATAACTACGATACGGGAGGGCTTACCATCTGGCCCCAGTGCT
GCAATGATACCGCGAGACCCACGCTCACCGGCTCCAGATTTATCAGCAATAAACCA
GCCAGCCGGAAGGGCCGAGCGCAGAAGTGGTCCTGCAACTTTATCCGCCTCCATC
CAGTCTATTAATTGTTGCCGGGAAGCTAGAGTAAGTAGTTCGCCAGTTAATAGTTT
GCGCAACGTTGTTGCCATTGCTACAGGCATCGTGGTGTCACGCTCGTCGTTTGGTA
TGGCTTCATTCAGCTCCGGTTCCCAACGATCAAGGCGAGTTACATGATCCCCCATG
TTGTGCAAAAAAGCGGTTAGCTCCTTCGGTCCTCCGATCGTTGTCAGAAGTAAGT
TGGCCGCAGTGTTATCACTCATGGTTATGGCAGCACTGCATAATTCTCTTACTGTCA
TGCCATCCGTAAGATGCTTTTCTGTGACTGGTGAGTACTCAACCAAGTCATTCTGA
GAATAGTGTATGCGGCGACCGAGTTGCTCTTGCCCGGCGTCAATACGGGATAATAC
CGCGCCACATAGCAGAACTTTAAAAGTGCTCATCATTGGAAAACGTTCTTCGGGG
CGAAAACTCTCAAGGATCTTACCGCTGTTGAGATCCAGTTCGATGTAACCCACTCG
TGCACCCAACTGATCTTCAGCATCTTTTACTTTCACCAGCGTTTCTGGGTGAGCAA
AAACAGGAAGGCAAAATGCCGCAAAAAAGGGAATAAGGGCGACACGGAAATGTT
GAATACTCATACTCTTCCTTTTTCAATATTATTGAAGCATTTATCAGGGTTATTGTCT
CATGAGCGGATACATATTTGAATGTATTTAGAAAAATAAACAAATAGGGGTTCCGC
GCACATTTCCCCGAAAAGTGCCACCTGACGTCGACGGATCGGGAGATCGATCTCC
CGATCCCCTAGGGTCGACTCTCAGTACAATCTGCTCTGATGCCGCATAGTTAAGCC
AGTATCTGCTCCCTGCTTGTGTGTTGGAGGTCGCTGAGTAGTGCGCGAGCAAAATT
TAAGCTACAACAAGGCAAGGCTTGACCGACAATTGCATGAAGAATCTGCTTAGGG
TTAGGCGTTTTGCGCTGCTTCGCGATGTACGGGCCAGATATACGCGTTGACATTGA
TTATTGACTAGTTATTAATAGTAATCAATTACGGGGTCATTAGTTCATAGCCCATATA
TGGAGTTCCGCGTTACATAACTTACGGTAAATGGCCCGCCTGGCTGACCGCCCAAC
GACCCCCGCCCATTGACGTCAATAATGACGTATGTTCCCATAGTAACGCCAATAGG
GACTTTCCATTGACGTCAATGGGTGGAGTATTTACGGTAAACTGCCCACTTGGCAG
TACATCAAGTGTATCATATGCCAAGTACGCCCCCTATTGACGTCAATGACGGTAAAT
GGCCCGCCTGGCATTATGCCCAGTACATGACCTTATGGGACTTTCCTACTTGGCAG
TACATCTACGTATTAGTCATCGCTATTACCATGGTGATGCGGTTTTGGCAGTACATC
AATGGGCGTGGATAGCGGTTTGACTCACGGGGATTTCCAAGTCTCCACCCCATTGA
CGTCAATGGGAGTTTGTTTTGGCACCAAAATCAACGGGACTTTCCAAAATGTCGT
AACAACTCCGCCCCATTGACGCAAATGGGCGGTAGGCGTGTACGGTGGGAGGTCT
ATATAAGCAGAGCTGGTTTAGTGAACCGTCAGATCCGCTAGAGATCCGCGGCCGCT
AATACGACTCACTATAGGGAGAGCCGCCACC
pCMV-PE2:
(SEQ ID NO: 734)
ATGAAACGGACAGCCGACGGAAGCGAGTTCGAGTCACCAAAGAAGAAGCGGAA
AGTCGACAAGAAGTACAGCATCGGCCTGGACATCGGCACCAACTCTGTGGGCTGG
GCCGTGATCACCGACGAGTACAAGGTGCCCAGCAAGAAATTCAAGGTGCTGGGC
AACACCGACCGGCACAGCATCAAGAAGAACCTGATCGGAGCCCTGCTGTTCGAC
AGCGGCGAAACAGCCGAGGCCACCCGGCTGAAGAGAACCGCCAGAAGAAGATA
CACCAGACGGAAGAACCGGATCTGCTATCTGCAAGAGATCTTCAGCAACGAGATG
GCCAAGGTGGACGACAGCTTCTTCCACAGACTGGAAGAGTCCTTCCTGGTGGAA
GAGGATAAGAAGCACGAGCGGCACCCCATCTTCGGCAACATCGTGGACGAGGTG
GCCTACCACGAGAAGTACCCCACCATCTACCACCTGAGAAAGAAACTGGTGGACA
GCACCGACAAGGCCGACCTGCGGCTGATCTATCTGGCCCTGGCCCACATGATCAA
GTTCCGGGGCCACTTCCTGATCGAGGGCGACCTGAACCCCGACAACAGCGACGT
GGACAAGCTGTTCATCCAGCTGGTGCAGACCTACAACCAGCTGTTCGAGGAAAAC
CCCATCAACGCCAGCGGCGTGGACGCCAAGGCCATCCTGTCTGCCAGACTGAGCA
AGAGCAGACGGCTGGAAAATCTGATCGCCCAGCTGCCCGGCGAGAAGAAGAATG
GCCTGTTCGGAAACCTGATTGCCCTGAGCCTGGGCCTGACCCCCAACTTCAAGAG
CAACTTCGACCTGGCCGAGGATGCCAAACTGCAGCTGAGCAAGGACACCTACGA
CGACGACCTGGACAACCTGCTGGCCCAGATCGGCGACCAGTACGCCGACCTGTTT
CTGGCCGCCAAGAACCTGTCCGACGCCATCCTGCTGAGCGACATCCTGAGAGTGA
ACACCGAGATCACCAAGGCCCCCCTGAGCGCCTCTATGATCAAGAGATACGACGA
GCACCACCAGGACCTGACCCTGCTGAAAGCTCTCGTGCGGCAGCAGCTGCCTGA
GAAGTACAAAGAGATTTTCTTCGACCAGAGCAAGAACGGCTACGCCGGCTACATT
GACGGCGGAGCCAGCCAGGAAGAGTTCTACAAGTTCATCAAGCCCATCCTGGAA
AAGATGGACGGCACCGAGGAACTGCTCGTGAAGCTGAACAGAGAGGACCTGCTG
CGGAAGCAGCGGACCTTCGACAACGGCAGCATCCCCCACCAGATCCACCTGGGA
GAGCTGCACGCCATTCTGCGGCGGCAGGAAGATTTTTACCCATTCCTGAAGGACA
ACCGGGAAAAGATCGAGAAGATCCTGACCTTCCGCATCCCCTACTACGTGGGCCC
TCTGGCCAGGGGAAACAGCAGATTCGCCTGGATGACCAGAAAGAGCGAGGAAAC
CATCACCCCCTGGAACTTCGAGGAAGTGGTGGACAAGGGCGCTTCCGCCCAGAG
CTTCATCGAGCGGATGACCAACTTCGATAAGAACCTGCCCAACGAGAAGGTGCTG
CCCAAGCACAGCCTGCTGTACGAGTACTTCACCGTGTATAACGAGCTGACCAAAG
TGAAATACGTGACCGAGGGAATGAGAAAGCCCGCCTTCCTGAGCGGCGAGCAGA
AAAAGGCCATCGTGGACCTGCTGTTCAAGACCAACCGGAAAGTGACCGTGAAGC
AGCTGAAAGAGGACTACTTCAAGAAAATCGAGTGCTTCGACTCCGTGGAAATCTC
CGGCGTGGAAGATCGGTTCAACGCCTCCCTGGGCACATACCACGATCTGCTGAAA
ATTATCAAGGACAAGGACTTCCTGGACAATGAGGAAAACGAGGACATTCTGGAAG
ATATCGTGCTGACCCTGACACTGTTTGAGGACAGAGAGATGATCGAGGAACGGCT
GAAAACCTATGCCCACCTGTTCGACGACAAAGTGATGAAGCAGCTGAAGCGGCG
GAGATACACCGGCTGGGGCAGGCTGAGCCGGAAGCTGATCAACGGCATCCGGGA
CAAGCAGTCCGGCAAGACAATCCTGGATTTCCTGAAGTCCGACGGCTTCGCCAAC
AGAAACTTCATGCAGCTGATCCACGACGACAGCCTGACCTTTAAAGAGGACATCC
AGAAAGCCCAGGTGTCCGGCCAGGGCGATAGCCTGCACGAGCACATTGCCAATCT
GGCCGGCAGCCCCGCCATTAAGAAGGGCATCCTGCAGACAGTGAAGGTGGTGGA
CGAGCTCGTGAAAGTGATGGGCCGGCACAAGCCCGAGAACATCGTGATCGAAAT
GGCCAGAGAGAACCAGACCACCCAGAAGGGACAGAAGAACAGCCGCGAGAGAA
TGAAGCGGATCGAAGAGGGCATCAAAGAGCTGGGCAGCCAGATCCTGAAAGAAC
ACCCCGTGGAAAACACCCAGCTGCAGAACGAGAAGCTGTACCTGTACTACCTGCA
GAATGGGCGGGATATGTACGTGGACCAGGAACTGGACATCAACCGGCTGTCCGAC
TACGATGTGGACGCTATCGTGCCTCAGAGCTTTCTGAAGGACGACTCCATCGACA
ACAAGGTGCTGACCAGAAGCGACAAGAACCGGGGCAAGAGCGACAACGTGCCC
TCCGAAGAGGTCGTGAAGAAGATGAAGAACTACTGGCGGCAGCTGCTGAACGCC
AAGCTGATTACCCAGAGAAAGTTCGACAATCTGACCAAGGCCGAGAGAGGCGGC
CTGAGCGAACTGGATAAGGCCGGCTTCATCAAGAGACAGCTGGTGGAAACCCGG
CAGATCACAAAGCACGTGGCACAGATCCTGGACTCCCGGATGAACACTAAGTACG
ACGAGAATGACAAGCTGATCCGGGAAGTGAAAGTGATCACCCTGAAGTCCAAGC
TGGTGTCCGATTTCCGGAAGGATTTCCAGTTTTACAAAGTGCGCGAGATCAACAA
CTACCACCACGCCCACGACGCCTACCTGAACGCCGTCGTGGGAACCGCCCTGATC
AAAAAGTACCCTAAGCTGGAAAGCGAGTTCGTGTACGGCGACTACAAGGTGTACG
ACGTGCGGAAGATGATCGCCAAGAGCGAGCAGGAAATCGGCAAGGCTACCGCCA
AGTACTTCTTCTACAGCAACATCATGAACTTTTTCAAGACCGAGATTACCCTGGCC
AACGGCGAGATCCGGAAGCGGCCTCTGATCGAGACAAACGGCGAAACCGGGGAG
ATCGTGTGGGATAAGGGCCGGGATTTTGCCACCGTGCGGAAAGTGCTGAGCATGC
CCCAAGTGAATATCGTGAAAAAGACCGAGGTGCAGACAGGCGGCTTCAGCAAAG
AGTCTATCCTGCCCAAGAGGAACAGCGATAAGCTGATCGCCAGAAAGAAGGACT
GGGACCCTAAGAAGTACGGCGGCTTCGACAGCCCCACCGTGGCCTATTCTGTGCT
GGTGGTGGCCAAAGTGGAAAAGGGCAAGTCCAAGAAACTGAAGAGTGTGAAAG
AGCTGCTGGGGATCACCATCATGGAAAGAAGCAGCTTCGAGAAGAATCCCATCGA
CTTTCTGGAAGCCAAGGGCTACAAAGAAGTGAAAAAGGACCTGATCATCAAGCT
GCCTAAGTACTCCCTGTTCGAGCTGGAAAACGGCCGGAAGAGAATGCTGGCCTCT
GCCGGCGAACTGCAGAAGGGAAACGAACTGGCCCTGCCCTCCAAATATGTGAAC
TTCCTGTACCTGGCCAGCCACTATGAGAAGCTGAAGGGCTCCCCCGAGGATAATG
AGCAGAAACAGCTGTTTGTGGAACAGCACAAGCACTACCTGGACGAGATCATCG
AGCAGATCAGCGAGTTCTCCAAGAGAGTGATCCTGGCCGACGCTAATCTGGACAA
AGTGCTGTCCGCCTACAACAAGCACCGGGATAAGCCCATCAGAGAGCAGGCCGA
GAATATCATCCACCTGTTTACCCTGACCAATCTGGGAGCCCCTGCCGCCTTCAAGT
ACTTTGACACCACCATCGACCGGAAGAGGTACACCAGCACCAAAGAGGTGCTGG
ACGCCACCCTGATCCACCAGAGCATCACCGGCCTGTACGAGACACGGATCGACCT
GTCTCAGCTGGGAGGTGACTCTGGAGGATCTAGCGGAGGATCCTCTGGCAGCGAG
ACACCAGGAACAAGCGAGTCAGCAACACCAGAGAGCAGTGGCGGCAGCAGCGG
CGGCAGCAGCACCCTAAATATAGAAGATGAGTATCGGCTACATGAGACCTCAAAA
GAGCCAGATGTTTCTCTAGGGTCCACATGGCTGTCTGATTTTCCTCAGGCCTGGGC
GGAAACCGGGGGCATGGGACTGGCAGTTCGCCAAGCTCCTCTGATCATACCTCTG
AAAGCAACCTCTACCCCCGTGTCCATAAAACAATACCCCATGTCACAAGAAGCCA
GACTGGGGATCAAGCCCCACATACAGAGACTGTTGGACCAGGGAATACTGGTACC
CTGCCAGTCCCCCTGGAACACGCCCCTGCTACCCGTTAAGAAACCAGGGACTAAT
GATTATAGGCCTGTCCAGGATCTGAGAGAAGTCAACAAGCGGGTGGAAGACATCC
ACCCCACCGTGCCCAACCCTTACAACCTCTTGAGCGGGCTCCCACCGTCCCACCA
GTGGTACACTGTGCTTGATTTAAAGGATGCCTTTTTCTGCCTGAGACTCCACCCCA
CCAGTCAGCCTCTCTTCGCCTTTGAGTGGAGAGATCCAGAGATGGGAATCTCAGG
ACAATTGACCTGGACCAGACTCCCACAGGGTTTCAAAAACAGTCCCACCCTGTTT
AATGAGGCACTGCACAGAGACCTAGCAGACTTCCGGATCCAGCACCCAGACTTGA
TCCTGCTACAGTACGTGGATGACTTACTGCTGGCCGCCACTTCTGAGCTAGACTGC
CAACAAGGTACTCGGGCCCTGTTACAAACCCTAGGGAACCTCGGGTATCGGGCCT
CGGCCAAGAAAGCCCAAATTTGCCAGAAACAGGTCAAGTATCTGGGGTATCTTCT
AAAAGAGGGTCAGAGATGGCTGACTGAGGCCAGAAAAGAGACTGTGATGGGGCA
GCCTACTCCGAAGACCCCTCGACAACTAAGGGAGTTCCTAGGGAAGGCAGGCTTC
TGTCGCCTCTTCATCCCTGGGTTTGCAGAAATGGCAGCCCCCCTGTACCCTCTCAC
CAAACCGGGGACTCTGTTTAATTGGGGCCCAGACCAACAAAAGGCCTATCAAGAA
ATCAAGCAAGCTCTTCTAACTGCCCCAGCCCTGGGGTTGCCAGATTTGACTAAGC
CCTTTGAACTCTTTGTCGACGAGAAGCAGGGCTACGCCAAAGGTGTCCTAACGCA
AAAACTGGGACCTTGGCGTCGGCCGGTGGCCTACCTGTCCAAAAAGCTAGACCC
AGTAGCAGCTGGGTGGCCCCCTTGCCTACGGATGGTAGCAGCCATTGCCGTACTG
ACAAAGGATGCAGGCAAGCTAACCATGGGACAGCCACTAGTCATTCTGGCCCCCC
ATGCAGTAGAGGCACTAGTCAAACAACCCCCCGACCGCTGGCTTTCCAACGCCCG
GATGACTCACTATCAGGCCTTGCTTTTGGACACGGACCGGGTCCAGTTCGGACCG
GTGGTAGCCCTGAACCCGGCTACGCTGCTCCCACTGCCTGAGGAAGGGCTGCAAC
ACAACTGCCTTGATATCCTGGCCGAAGCCCACGGAACCCGACCCGACCTAACGGA
CCAGCCGCTCCCAGACGCCGACCACACCTGGTACACGGATGGAAGCAGTCTCTTA
CAAGAGGGACAGCGTAAGGCGGGAGCTGCGGTGACCACCGAGACCGAGGTAATC
TGGGCTAAAGCCCTGCCAGCCGGGACATCCGCTCAGCGGGCTGAACTGATAGCAC
TCACCCAGGCCCTAAAGATGGCAGAAGGTAAGAAGCTAAATGTTTATACTGATAGC
CGTTATGCTTTTGCTACTGCCCATATCCATGGAGAAATATACAGAAGGCGTGGGTG
GCTCACATCAGAAGGCAAAGAGATCAAAAATAAAGACGAGATCTTGGCCCTACTA
AAAGCCCTCTTTCTGCCCAAAAGACTTAGCATAATCCATTGTCCAGGACATCAAAA
GGGACACAGCGCCGAGGCTAGAGGCAACCGGATGGCTGACCAAGCGGCCCGAAA
GGCAGCCATCACAGAGACTCCAGACACCTCTACCCTCCTCATAGAAAATTCATCAC
CCTCTGGCGGCTCAAAAAGAACCGCCGACGGCAGCGAATTCGAGCCCAAGAAGA
AGAGGAAAGTCTAACCGGTCATCATCACCATCACCATTGAGTTTAAACCCGCTGAT
CAGCCTCGACTGTGCCTTCTAGTTGCCAGCCATCTGTTGTTTGCCCCTCCCCCGTG
CCTTCCTTGACCCTGGAAGGTGCCACTCCCACTGTCCTTTCCTAATAAAATGAGAA
AATTGCATCGCATTGTCTGAGTAGGTGTCATTCTATTCTGGGGGGTGGGGTGGGGC
AGGACAGCAAGGGGGAGGATTGGGAAGACAATAGCAGGCATGCTGGGGATGCGG
TGGGCTCTATGGCTTCTGAGGCGGAAAGAACCAGCTGGGGCTCGATACCGTCGAC
CTCTAGCTAGAGCTTGGCGTAATCATGGTCATAGCTGTTTCCTGTGTGAAATTGTTA
TCCGCTCACAATTCCACACAACATACGAGCCGGAAGCATAAAGTGTAAAGCCTAG
GGTGCCTAATGAGTGAGCTAACTCACATTAATTGCGTTGCGCTCACTGCCCGCTTT
CCAGTCGGGAAACCTGTCGTGCCAGCTGCATTAATGAATCGGCCAACGCGCGGGG
AGAGGCGGTTTGCGTATTGGGCGCTCTTCCGCTTCCTCGCTCACTGACTCGCTGCG
CTCGGTCGTTCGGCTGCGGCGAGCGGTATCAGCTCACTCAAAGGCGGTAATACGG
TTATCCACAGAATCAGGGGATAACGCAGGAAAGAACATGTGAGCAAAAGGCCAG
CAAAAGGCCAGGAACCGTAAAAAGGCCGCGTTGCTGGCGTTTTTCCATAGGCTCC
GCCCCCCTGACGAGCATCACAAAAATCGACGCTCAAGTCAGAGGTGGCGAAACC
CGACAGGACTATAAAGATACCAGGCGTTTCCCCCTGGAAGCTCCCTCGTGCGCTCT
CCTGTTCCGACCCTGCCGCTTACCGGATACCTGTCCGCCTTTCTCCCTTCGGGAAG
CGTGGCGCTTTCTCATAGCTCACGCTGTAGGTATCTCAGTTCGGTGTAGGTCGTTC
GCTCCAAGCTGGGCTGTGTGCACGAACCCCCCGTTCAGCCCGACCGCTGCGCCTT
ATCCGGTAACTATCGTCTTGAGTCCAACCCGGTAAGACACGACTTATCGCCACTGG
CAGCAGCCACTGGTAACAGGATTAGCAGAGCGAGGTATGTAGGCGGTGCTACAGA
GTTCTTGAAGTGGTGGCCTAACTACGGCTACACTAGAAGAACAGTATTTGGTATCT
GCGCTCTGCTGAAGCCAGTTACCTTCGGAAAAAGAGTTGGTAGCTCTTGATCCGG
CAAACAAACCACCGCTGGTAGCGGTGGTTTTTTTGTTTGCAAGCAGCAGATTACG
CGCAGAAAAAAAGGATCTCAAGAAGATCCTTTGATCTTTTCTACGGGGTCTGACG
CTCAGTGGAACGAAAACTCACGTTAAGGGATTTTGGTCATGAGATTATCAAAAAG
GATCTTCACCTAGATCCTTTTAAATTAAAAATGAAGTTTTAAATCAATCTAAAGTAT
ATATGAGTAAACTTGGTCTGACAGTTACCAATGCTTAATCAGTGAGGCACCTATCT
CAGCGATCTGTCTATTTCGTTCATCCATAGTTGCCTGACTCCCCGTCGTGTAGATAA
CTACGATACGGGAGGGCTTACCATCTGGCCCCAGTGCTGCAATGATACCGCGAGA
CCCACGCTCACCGGCTCCAGATTTATCAGCAATAAACCAGCCAGCCGGAAGGGCC
GAGCGCAGAAGTGGTCCTGCAACTTTATCCGCCTCCATCCAGTCTATTAATTGTTG
CCGGGAAGCTAGAGTAAGTAGTTCGCCAGTTAATAGTTTGCGCAACGTTGTTGCC
ATTGCTACAGGCATCGTGGTGTCACGCTCGTCGTTTGGTATGGCTTCATTCAGCTC
CGGTTCCCAACGATCAAGGCGAGTTACATGATCCCCCATGTTGTGCAAAAAAGCG
GTTAGCTCCTTCGGTCCTCCGATCGTTGTCAGAAGTAAGTTGGCCGCAGTGTTATC
ACTCATGGTTATGGCAGCACTGCATAATTCTCTTACTGTCATGCCATCCGTAAGATG
CTTTTCTGTGACTGGTGAGTACTCAACCAAGTCATTCTGAGAATAGTGTATGCGGC
GACCGAGTTGCTCTTGCCCGGCGTCAATACGGGATAATACCGCGCCACATAGCAG
AACTTTAAAAGTGCTCATCATTGGAAAACGTTCTTCGGGGCGAAAACTCTCAAGG
ATCTTACCGCTGTTGAGATCCAGTTCGATGTAACCCACTCGTGCACCCAACTGATC
TTCAGCATCTTTTACTTTCACCAGCGTTTCTGGGTGAGCAAAAACAGGAAGGCAA
AATGCCGCAAAAAAGGGAATAAGGGCGACACGGAAATGTTGAATACTCATACTCT
TCCTTTTTCAATATTATTGAAGCATTTATCAGGGTTATTGTCTCATGAGCGGATACAT
ATTTGAATGTATTTAGAAAAATAAACAAATAGGGGTTCCGCGCACATTTCCCCGAA
AAGTGCCACCTGACGTCGACGGATCGGGAGATCGATCTCCCGATCCCCTAGGGTC
GACTCTCAGTACAATCTGCTCTGATGCCGCATAGTTAAGCCAGTATCTGCTCCCTG
CTTGTGTGTTGGAGGTCGCTGAGTAGTGCGCGAGCAAAATTTAAGCTACAACAAG
GCAAGGCTTGACCGACAATTGCATGAAGAATCTGCTTAGGGTTAGGCGTTTTGCG
CTGCTTCGCGATGTACGGGCCAGATATACGCGTTGACATTGATTATTGACTAGTTAT
TAATAGTAATCAATTACGGGGTCATTAGTTCATAGCCCATATATGGAGTTCCGCGTTA
CATAACTTACGGTAAATGGCCCGCCTGGCTGACCGCCCAACGACCCCCGCCCATTG
ACGTCAATAATGACGTATGTTCCCATAGTAACGCCAATAGGGACTTTCCATTGACGT
CAATGGGTGGAGTATTTACGGTAAACTGCCCACTTGGCAGTACATCAAGTGTATCA
TATGCCAAGTACGCCCCCTATTGACGTCAATGACGGTAAATGGCCCGCCTGGCATT
ATGCCCAGTACATGACCTTATGGGACTTTCCTACTTGGCAGTACATCTACGTATTAG
TCATCGCTATTACCATGGTGATGCGGTTTTGGCAGTACATCAATGGGCGTGGATAGC
GGTTTGACTCACGGGGATTTCCAAGTCTCCACCCCATTGACGTCAATGGGAGTTTG
TTTTGGCACCAAAATCAACGGGACTTTCCAAAATGTCGTAACAACTCCGCCCCATT
GACGCAAATGGGCGGTAGGCGTGTACGGTGGGAGGTCTATATAAGCAGAGCTGGT
TTAGTGAACCGTCAGATCCGCTAGAGATCCGCGGCCGCTAATACGACTCACTATAG
GGAGAGCCGCCACC
N-terminal NLS + Cas9 H840A
Flexible linker
M-MLV reverse transcriptase + C-terminal NLS
Plasmid backbone (containing CMV promoter and AmpR)
pU6-HEK3_PEgRNA_CTTins:
(SEQ ID NO: 735)
GAGGGCCTATTTCCCATGATTCCTTCATATTTGCATATACGATACAAGGCTGTTAGA
GAGATAATTAGAATTAATTTGACTGTAAACACAAAGATATTAGTACAAAATACGTG
ACGTAGAAAGTAATAATTTCTTGGGTAGTTTGCAGTTTTAAAATTATGTTTTAAAAT
GGACTATCATATGCTTACCGTAACTTGAAAGTATTTCGATTTCTTGGCTTTATATATC
TTGTGGAAAGGACGAAACACCGGCCCAGACTGAGCACGTGAGTTTTAGAGCTAGA
AATAGCAAGTTAAAATAAGGCTAGTCCGTTATCAACTTGAAAAAGTGGGACCGAG
TCGGTCCTCTGCCATCAAAGCGTGCTCAGTCTGTTTTTTTAAGCTTGGGCCGCT
CGAGGTACCTCTCTACATATGACATGTGAGCAAAAGGCCAGCAAAAGGCCAGGAA
CCGTAAAAAGGCCGCGTTGCTGGCGTTTTTCCATAGGCTCCGCCCCCCTGACGAG
CATCACAAAAATCGACGCTCAAGTCAGAGGTGGCGAAACCCGACAGGACTATAA
AGATACCAGGCGTTTCCCCCTGGAAGCTCCCTCGTGCGCTCTCCTGTTCCGACCCT
GCCGCTTACCGGATACCTGTCCGCCTTTCTCCCTTCGGGAAGCGTGGCGCTTTCTC
ATAGCTCACGCTGTAGGTATCTCAGTTCGGTGTAGGTCGTTCGCTCCAAGCTGGGC
TGTGTGCACGAACCCCCCGTTCAGCCCGACCGCTGCGCCTTATCCGGTAACTATCG
TCTTGAGTCCAACCCGGTAAGACACGACTTATCGCCACTGGCAGCAGCCACTGGT
AACAGGATTAGCAGAGCGAGGTATGTAGGCGGTGCTACAGAGTTCTTGAAGTGGT
GGCCTAACTACGGCTACACTAGAAGAACAGTATTTGGTATCTGCGCTCTGCTGAAG
CCAGTTACCTTCGGAAAAAGAGTTGGTAGCTCTTGATCCGGCAAACAAACCACCG
CTGGTAGCGGTGGTTTTTTTGTTTGCAAGCAGCAGATTACGCGCAGAAAAAAAGG
ATCTCAAGAAGATCCTTTGATCTTTTCTACGGGGTCTGACGCTCAGTGGAACGAAA
ACTCACGTTAAGGGATTTTGGTCATGAGATTATCAAAAAGGATCTTCACCTAGATC
CTTTTAAATTAAAAATGAAGTTTTAAATCAATCTAAAGTATATATGAGTAAACTTGG
TCTGACAGTTACCAATGCTTAATCAGTGAGGCACCTATCTCAGCGATCTGTCTATTT
CGTTCATCCATAGTTGCCTGACTCCCCGTCGTGTAGATAACTACGATACGGGAGGG
CTTACCATCTGGCCCCAGTGCTGCAATGATACCGCGAGACCCACGCTCACCGGCTC
CAGATTTATCAGCAATAAACCAGCCAGCCGGAAGGGCCGAGCGCAGAAGTGGTC
CTGCAACTTTATCCGCCTCCATCCAGTCTATTAATTGTTGCCGGGAAGCTAGAGTAA
GTAGTTCGCCAGTTAATAGTTTGCGCAACGTTGTTGCCATTGCTACAGGCATCGTG
GTGTCACGCTCGTCGTTTGGTATGGCTTCATTCAGCTCCGGTTCCCAACGATCAAG
GCGAGTTACATGATCCCCCATGTTGTGCAAAAAAGCGGTTAGCTCCTTCGGTCCTC
CGATCGTTGTCAGAAGTAAGTTGGCCGCAGTGTTATCACTCATGGTTATGGCAGCA
CTGCATAATTCTCTTACTGTCATGCCATCCGTAAGATGCTTTTCTGTGACTGGTGAG
TACTCAACCAAGTCATTCTGAGAATAGTGTATGCGGCGACCGAGTTGCTCTTGCCC
GGCGTCAATACGGGATAATACCGCGCCACATAGCAGAACTTTAAAAGTGCTCATCA
TTGGAAAACGTTCTTCGGGGCGAAAACTCTCAAGGATCTTACCGCTGTTGAGATC
CAGTTCGATGTAACCCACTCGTGCACCCAACTGATCTTCAGCATCTTTTACTTTCA
CCAGCGTTTCTGGGTGAGCAAAAACAGGAAGGCAAAATGCCGCAAAAAAGGGA
ATAAGGGCGACACGGAAATGTTGAATACTCATACTCTTCCTTTTTCAATATTATTGA
AGCATTTATCAGGGTTATTGTCTCATGAGCGGATACATATTTGAATGTATTTAGAAA
AATAAACAAATAGGGGTTCCGCGCACATTTCCCCGAAAAGTGCCACCTGACGTCG
CTAGCTGTACAAAAAAGCAGGCTTTAAAGGAACCAATTCAGTCGACTGGATCCGG
TACCAAGGTCGGGCAGGAA
U6 Promoter sequence
Spacer sequence
sgRNA scaffold
3′ extension (contains PBS and RT template)
Backbone (contains AmpR)
pLenti-hSyn-N-PE2-NpuN-P2A-GFP-KASH_U6-DNMT1-PEgRNA:
(SEQ ID NO: 736)
GTCGACGGATCGGGAGATCTCCCGATCCCCTATGGTGCACTCTCAGTACAATCTGCTCT
GATGCCGCATAGTTAAGCCAGTATCTGCTCCCTGCTTGTGTGTTGGAGGTCGCTGAGTA
GTGCGCGAGCAAAATTTAAGCTACAACAAGGCAAGGCTTGACCGACAATTGCATGAAG
AATCTGCTTAGGGTTAGGCGTTTTGCGCTGCTTCGCGATGTACGGGCCAGATATACGCG
TTGACATTGATTATTGACTAGTTATTAATAGTAATCAATTACGGGGTCATTAGTTCATAGC
CCATATATGGAGTTCCGCGTTACATAACTTACGGTAAATGGCCCGCCTGGCTGACCGCC
CAACGACCCCCGCCCATTGACGTCAATAATGACGTATGTTCCCATAGTAACGCCAATAG
GGACTTTCCATTGACGTCAATGGGTGGAGTATTTACGGTAAACTGCCCACTTGGCAGTA
CATCAAGTGTATCATATGCCAAGTACGCCCCCTATTGACGTCAATGACGGTAAATGGCC
CGCCTGGCATTATGCCCAGTACATGACCTTATGGGACTTTCCTACTTGGCAGTACATCTA
CGTATTAGTCATCGCTATTACCATGGTGATGCGGTTTTGGCAGTACATCAATGGGCGTGG
ATAGCGGTTTGACTCACGGGGATTTCCAAGTCTCCACCCCATTGACGTCAATGGGAGTT
TGTTTTGGCACCAAAATCAACGGGACTTTCCAAAATGTCGTAACAACTCCGCCCCATTG
ACGCAAATGGGCGGTAGGCGTGTACGGTGGGAGGTCTATATAAGCAGCGCGTTTTGCC
TGTACTGGGTCTCTCTGGTTAGACCAGATCTGAGCCTGGGAGCTCTCTGGCTAACTAGG
GAACCCACTGCTTAAGCCTCAATAAAGCTTGCCTTGAGTGCTTCAAGTAGTGTGTGCCC
GTCTGTTGTGTGACTCTGGTAACTAGAGATCCCTCAGACCCTTTTAGTCAGTGTGGAAA
ATCTCTAGCAGTGGCGCCCGAACAGGGACTTGAAAGCGAAAGGGAAACCAGAGGAGC
TCTCTCGACGCAGGACTCGGCTTGCTGAAGCGCGCACGGCAAGAGGCGAGGGGCGGC
GACTGGTGAGTACGCCAAAAATTTTGACTAGCGGAGGCTAGAAGGAGAGAGATGGGT
GCGAGAGCGTCAGTATTAAGCGGGGGAGAATTAGATCGCGATGGGAAAAAATTCGGTT
AAGGCCAGGGGGAAAGAAAAAATATAAATTAAAACATATAGTATGGGCAAGCAGGGAG
CTAGAACGATTCGCAGTTAATCCTGGCCTGTTAGAAACATCAGAAGGCTGTAGACAAAT
ACTGGGACAGCTACAACCATCCCTTCAGACAGGATCAGAAGAACTTAGATCATTATATA
ATACAGTAGCAACCCTCTATTGTGTGCATCAAAGGATAGAGATAAAAGACACCAAGGA
AGCTTTAGACAAGATAGAGGAAGAGCAAAACAAAAGTAAGACCACCGCACAGCAAGC
GGCCGCTGATCTTCAGACCTGGAGGAGGAGATATGAGGGACAATTGGAGAAGTGAATT
ATATAAATATAAAGTAGTAAAAATTGAACCATTAGGAGTAGCACCCACCAAGGCAAAGA
GAAGAGTGGTGCAGAGAGAAAAAAGAGCAGTGGGAATAGGAGCTTTGTTCCTTGGGT
TCTTGGGAGCAGCAGGAAGCACTATGGGCGCAGCGTCAATGACGCTGACGGTACAGG
CCAGACAATTATTGTCTGGTATAGTGCAGCAGCAGAACAATTTGCTGAGGGCTATTGAG
GCGCAACAGCATCTGTTGCAACTCACAGTCTGGGGCATCAAGCAGCTCCAGGCAAGA
ATCCTGGCTGTGGAAAGATACCTAAAGGATCAACAGCTCCTGGGGATTTGGGGTTGCT
CTGGAAAACTCATTTGCACCACTGCTGTGCCTTGGAATGCTAGTTGGAGTAATAAATCT
CTGGAACAGATTTGGAATCACACGACCTGGATGGAGTGGGACAGAGAAATTAACAATT
ACACAAGCTTAATACACTCCTTAATTGAAGAATCGCAAAACCAGCAAGAAAAGAATGA
ACAAGAATTATTGGAATTAGATAAATGGGCAAGTTTGTGGAATTGGTTTAACATAACAA
ATTGGCTGTGGTATATAAAATTATTCATAATGATAGTAGGAGGCTTGGTAGGTTTAAGAA
TAGTTTTTGCTGTACTTTCTATAGTGAATAGAGTTAGGCAGGGATATTCACCATTATCGTT
TCAGACCCACCTCCCAACCCCGAGGGGACCCGACAGGCCCGAAGGAATAGAAGAAGA
AGGTGGAGAGAGAGACAGAGACAGATCCATTCGATTAGTGAACGGATCGGCACTGCG
TGCGCCAATTCTGCAGACAAATGGCAGTATTCATCCACAATTTTAAAAGAAAAGGGGG
GATTGGGGGGTACAGTGCAGGGGAAAGAATAGTAGACATAATAGCAACAGACATACAA
ACTAAAGAATTACAAAAACAAATTACAAAAATTCAAAATTTTCGGGTTTATTACAGGGA
CAGCAGAGATCCAGTTTGGTTAATTAAGGTACCAAGGTCGGGCAGGAAGAGGGCCTAT
TTCCCATGATTCCTTCATATTTGCATATACGATACAAGGCTGTTAGAGAGATAATTAGAAT
TAATTTGACTGTAAACACAAAGATATTAGTACAAAATACGTGACGTAGAAAGTAATAAT
TTCTTGGGTAGTTTGCAGTTTTAAAATTATGTTTTAAAATGGACTATCATATGCTTACCGT
AACTTGAAAGTATTTCGATTTCTTGGCTTTATATATCTTGTGGAAAGGACGAAACACCG
CGGGCTGGAGCTGTTCGCGCGTTTTAGAGCTAGAAATAGCAAGTTAAAATAAGGC
TAGTCCGTTATCAACTTGAAAAAGTGGCACCGAGTCGGTGCAAGATGCAAGCGC
GAACAGCTCCAGTTTTTTTGAATTCAGTGCAAGTGGGTTTTAGGACCAGGATGAGGCG
GGGTGGGGGTGCCTACCTGACGACCGACCCCGACCCACTGGACAAGCACCCAACCCCCAT
TCCCCAAATTGCGCATCCCCTATCAGAGAGGGGGAGGGGAAACAGGATGCGGCGAGGCGC
GTGCGCACTGCCAGCTTCAGCACCGCGGACAGTGCCTTCGCCCCCGCCTGGCGGCGCGC
GCCACCGCCGCCTCAGCACTGAAGGCGCGCTGACGTCACTCGCCGGTCCCCCGCAAACTC
CCCTTCCCGGCCACCTTGGTCGCGTCCGCGCCGCCGCCGGCCCAGCCGGACCGCACCAC
GCGAGGCGCGAGATAGGGGGGCACGGGCGCGACCATCTGCGCTGCGGCGCCGGCGACT
CAGCGCTGCCTCAGTCTGCGGTGGGCAGCGGAGGAGTCGTGTCGTGCCTGAGAGCGCAG
TCGAGAATCTAGAGCGCTGCCACCATGAAACGGACAGCCGACGGAAGCGAGTTCGAGT
CACCAAAGAAGAAGCGGAAAGTCGACAAGAAGTACAGCATCGGCCTGGACATCGGCA
CCAACTCTGTGGGCTGGGCCGTGATCACCGACGAGTACAAGGTGCCCAGCAAGAAATT
CAAGGTGCTGGGCAACACCGACCGGCACAGCATCAAGAAGAACCTGATCGGAGCCCT
GCTGTTCGACAGCGGCGAAACAGCCGAGGCCACCCGGCTGAAGAGAACCGCCAGAA
GAAGATACACCAGACGGAAGAACCGGATCTGCTATCTGCAAGAGATCTTCAGCAACGA
GATGGCCAAGGTGGACGACAGCTTCTTCCACAGACTGGAAGAGTCCTTCCTGGTGGA
AGAGGATAAGAAGCACGAGCGGCACCCCATCTTCGGCAACATCGTGGACGAGGTGGC
CTACCACGAGAAGTACCCCACCATCTACCACCTGAGAAAGAAACTGGTGGACAGCAC
CGACAAGGCCGACCTGCGGCTGATCTATCTGGCCCTGGCCCACATGATCAAGTTCCGG
GGCCACTTCCTGATCGAGGGCGACCTGAACCCCGACAACAGCGACGTGGACAAGCTG
TTCATCCAGCTGGTGCAGACCTACAACCAGCTGTTCGAGGAAAACCCCATCAACGCCA
GCGGCGTGGACGCCAAGGCCATCCTGTCTGCCAGACTGAGCAAGAGCAGACGGCTGG
AAAATCTGATCGCCCAGCTGCCCGGCGAGAAGAAGAATGGCCTGTTCGGAAACCTGAT
TGCCCTGAGCCTGGGCCTGACCCCCAACTTCAAGAGCAACTTCGACCTGGCCGAGGAT
GCCAAACTGCAGCTGAGCAAGGACACCTACGACGACGACCTGGACAACCTGCTGGCC
CAGATCGGCGACCAGTACGCCGACCTGTTTCTGGCCGCCAAGAACCTGTCCGACGCCA
TCCTGCTGAGCGACATCCTGAGAGTGAACACCGAGATCACCAAGGCCCCCCTGAGCGC
CTCTATGATCAAGAGATACGACGAGCACCACCAGGACCTGACCCTGCTGAAAGCTCTC
GTGCGGCAGCAGCTGCCTGAGAAGTACAAAGAGATTTTCTTCGACCAGAGCAAGAAC
GGCTACGCCGGCTACATTGACGGCGGAGCCAGCCAGGAAGAGTTCTACAAGTTCATCA
AGCCCATCCTGGAAAAGATGGACGGCACCGAGGAACTGCTCGTGAAGCTGAACAGAG
AGGACCTGCTGCGGAAGCAGCGGACCTTCGACAACGGCAGCATCCCCCACCAGATCC
ACCTGGGAGAGCTGCACGCCATTCTGCGGCGGCAGGAAGATTTTTACCCATTCCTGAA
GGACAACCGGGAAAAGATCGAGAAGATCCTGACCTTCCGCATCCCCTACTACGTGGGC
CCTCTGGCCAGGGGAAACAGCAGATTCGCCTGGATGACCAGAAAGAGCGAGGAAACC
ATCACCCCCTGGAACTTCGAGGAAGTGGTGGACAAGGGCGCTTCCGCCCAGAGCTTC
ATCGAGCGGATGACCAACTTCGATAAGAACCTGCCCAACGAGAAGGTGCTGCCCAAGC
ACAGCCTGCTGTACGAGTACTTCACCGTGTATAACGAGCTGACCAAAGTGAAATACGT
GACCGAGGGAATGAGAAAGCCCGCCTTCCTGAGCGGCGAGCAGAAAAAGGCCATCGT
GGACCTGCTGTTCAAGACCAACCGGAAAGTGACCGTGAAGCAGCTGAAAGAGGACTA
CTTCAAGAAAATCGAGTGCCTGTCCTACGAGACAGAGATCCTGACAGTGGAGTATGGCCT
GCTGCCAATCGGCAAGATCGTGGAGAAGAGGATCGAGTGTACCGTGTACTCTGTGGATAAC
AATGGCAACATCTATACACAGCCCGTGGCACAGTGGCACGATAGGGGAGAGCAGGAGGTGT
TCGAGTATTGCCTGGAGGACGGCAGCCTGATCAGGGCAACCAAGGACCACAAGTTCATGAC
AGTGGATGGCCAGATGCTGCCCATCGACGAGATTTTCGAGCGGGAGCTGGACCTGATGAGA
GTGGATAACCTGCCTAATAGCGGAGGCAGTAAAAGAACAGCAGACGGGAGTGAGTTTGA
GCCCAAGAAAAAGAGAAAGGTGGGATCCGGCGCAACAAACTTCTCTCTGCTGAAACAA
GCCGGAGATGTCGAAGAGAATCCTGGACCGGTGAGCAAGGGCGAGGAGCTGTTCACCG
GGGTGGTGCCCATCCTGGTCGAGCTGGACGGCGACGTAAACGGCCACAAGTTCAGCGT
GTCCGCCGAGGGCGAGGGCGATGCCACCTACGGCAAGCTGACCCTGAAGTTCATCTGC
ACCACCGGCAAGCTGCCCGTGCCCTGGCCCACCCTCGTGACCACCCTGACCTACGGCGT
GCAGTGCTTCAGCCGCTACCCCGACCACATGAAGCAGCACGACTTCTTCAAGTCCGCCA
TGCCCGAAGGCTACGTCCAGGAGCGCACCATCTTCTTCAAGGACGACGGCAACTACAAG
ACCCGCGCCGAGGTGAAGTTCGAGGGCGACACCCTGGTGAACCGCATCGAGCTGAAGG
GCATCGACTTCAAGGAGGACGGCAACATCCTGGGGCACAAGCTGGAGTACAACTACAAC
AGCCACAACGTCTATATCATGGCCGACAAGCAGAAGAACGGCATCAAGGTGAACTTCAA
GATCCGCCACAACATCGAGGACGGCAGCGTGCAGCTCGCCGACCACTACCAGCAGAAC
ACCCCCATCGGCGACGGCCCCGTGCTGCTGCCCGACAACCACTACCTGAGCACCCAGTC
CGCCCTGAGCAAAGACCCCAACGAGAAGCGCGATCACATGGTCCTGCTGGAGTTCGTG
ACCGCCGCCGGGATCACTCTCGGCATGGACGAGCTGTACAAGTCCGGACTCAGATCTCG
AGAGGAGGAGGAGGAGACAGACAGCAGGATGCCCCACCTCGACAGCCCCGGCAGCTCC
CAGCCGAGACGCTCCTTCCTCTCAAGGGTGATCAGGGCAGCGCTACCGTTGCAGCTGCT
TCTGCTGCTGCTGCTGCTCCTGGCCTGCCTGCTACCTGCCTCTGAAGATGACTACAGCT
GCACCCAGGCCAACAACTTTGCCCGATCCTTCTACCCCATGCTGCGGTACACCAACGGG
CCACCTCCCACCTAAACGCGTTAACTCGACAATCAACCTCTGGATTACAAAATTTGTGA
AAGATTGACTGGTATTCTTAACTATGTTGCTCCTTTTACGCTATGTGGATACGCTGCTTTA
ATGCCTTTGTATCATGCTATTGCTTCCCGTATGGCTTTCATTTTCTCCTCCTTGTATAAATC
CTGGTTGCTGTCTCTTTATGAGGAGTTGTGGCCCGTTGTCAGGCAACGTGGCGTGGTGT
GCACTGTGTTTGCTGACGCAACCCCCACTGGTTGGGGCATTGCCACCACCTGTCAGCT
CCTTTCCGGGACTTTCGCTTTCCCCCTCCCTATTGCCACGGCGGAACTCATCGCCGCCT
GCCTTGCCCGCTGCTGGACAGGGGCTCGGCTGTTGGGCACTGACAATTCCGTGGTGTT
GTCGGGGAAATCATCGTCCTTTCCTTGGCTGCTCGCCTGTGTTGCCACCTGGATTCTGC
GCGGGACGTCCTTCTGCTACGTCCCTTCGGCCCTCAATCCAGCGGACCTTCCTTCCCGC
GGCCTGCTGCCGGCTCTGCGGCCTCTTCCGCGTCTTCGCCTTCGCCCTCAGACGAGTC
GGATCTCCCTTTGGGCCGCCTCCCCGCGTCGACTTTAAGACCAATGACTTACAAGGCA
GCTGTAGATCTTAGCCACTTTTTAAAAGAAAAGGGGGGACTGGAAGGGCTAATTCACT
CCCAACGAAGACAAGATCTGCTTTTTGCTTGTACTGGGTCTCTCTGGTTAGACCAGATC
TGAGCCTGGGAGCTCTCTGGCTAACTAGGGAACCCACTGCTTAAGCCTCAATAAAGCT
TGCCTTGAGTGCTTCAAGTAGTGTGTGCCCGTCTGTTGTGTGACTCTGGTAACTAGAGA
TCCCTCAGACCCTTTTAGTCAGTGTGGAAAATCTCTAGCAGGGCCCGTTTAAACCCGCT
GATCAGCCTCGACTGTGCCTTCTAGTTGCCAGCCATCTGTTGTTTGCCCCTCCCCCGTG
CCTTCCTTGACCCTGGAAGGTGCCACTCCCACTGTCCTTTCCTAATAAAATGAGGAAAT
TGCATCGCATTGTCTGAGTAGGTGTCATTCTATTCTGGGGGGTGGGGTGGGGCAGGACA
GCAAGGGGGAGGATTGGGAAGACAATAGCAGGCATGCTGGGGATGCGGTGGGCTCTAT
GGCTTCTGAGGCGGAAAGAACCAGCTGGGGCTCTAGGGGGTATCCCCACGCGCCCTGT
AGCGGCGCATTAAGCGCGGCGGGTGTGGTGGTTACGCGCAGCGTGACCGCTACACTTG
CCAGCGCCCTAGCGCCCGCTCCTTTCGCTTTCTTCCCTTCCTTTCTCGCCACGTTCGCC
GGCTTTCCCCGTCAAGCTCTAAATCGGGGGCTCCCTTTAGGGTTCCGATTTAGTGCTTT
ACGGCACCTCGACCCCAAAAAACTTGATTAGGGTGATGGTTCACGTAGTGGGCCATCG
CCCTGATAGACGGTTTTTCGCCCTTTGACGTTGGAGTCCACGTTCTTTAATAGTGGACT
CTTGTTCCAAACTGGAACAACACTCAACCCTATCTCGGTCTATTCTTTTGATTTATAAGG
GATTTTGCCGATTTCGGCCTATTGGTTAAAAAATGAGCTGATTTAACAAAAATTTAACGC
GAATTAATTCTGTGGAATGTGTGTCAGTTAGGGTGTGGAAAGTCCCCAGGCTCCCCAG
CAGGCAGAAGTATGCAAAGCATGCATCTCAATTAGTCAGCAACCAGGTGTGGAAAGTC
CCCAGGCTCCCCAGCAGGCAGAAGTATGCAAAGCATGCATCTCAATTAGTCAGCAACC
ATAGTCCCGCCCCTAACTCCGCCCATCCCGCCCCTAACTCCGCCCAGTTCCGCCCATTC
TCCGCCCCATGGCTGACTAATTTTTTTTATTTATGCAGAGGCCGAGGCCGCCTCTGCCTC
TGAGCTATTCCAGAAGTAGTGAGGAGGCTTTTTTGGAGGCCTAGGCTTTTGCAAAAAG
CTCCCGGGAGCTTGTATATCCATTTTCGGATCTGATCAGCACGTGTTGACAATTAATCAT
CGGCATAGTATATCGGCATAGTATAATACGACAAGGTGAGGAACTAAACCATGGCCAAG
TTGACCAGTGCCGTTCCGGTGCTCACCGCGCGCGACGTCGCCGGAGCGGTCGAGTTCT
GGACCGACCGGCTCGGGTTCTCCCGGGACTTCGTGGAGGACGACTTCGCCGGTGTGGT
CCGGGACGACGTGACCCTGTTCATCAGCGCGGTCCAGGACCAGGTGGTGCCGGACAA
CACCCTGGCCTGGGTGTGGGTGCGCGGCCTGGACGAGCTGTACGCCGAGTGGTCGGA
GGTCGTGTCCACGAACTTCCGGGACGCCTCCGGGCCGGCCATGACCGAGATCGGCGA
GCAGCCGTGGGGGCGGGAGTTCGCCCTGCGCGACCCGGCCGGCAACTGCGTGCACTT
CGTGGCCGAGGAGCAGGACTGACACGTGCTACGAGATTTCGATTCCACCGCCGCCTTC
TATGAAAGGTTGGGCTTCGGAATCGTTTTCCGGGACGCCGGCTGGATGATCCTCCAGCG
CGGGGATCTCATGCTGGAGTTCTTCGCCCACCCCAACTTGTTTATTGCAGCTTATAATGG
TTACAAATAAAGCAATAGCATCACAAATTTCACAAATAAAGCATTTTTTTCACTGCATTC
TAGTTGTGGTTTGTCCAAACTCATCAATGTATCTTATCATGTCTGTATACCGTCGACCTCT
AGCTAGAGCTTGGCGTAATCATGGTCATAGCTGTTTCCTGTGTGAAATTGTTATCCGCTC
ACAATTCCACACAACATACGAGCCGGAAGCATAAAGTGTAAAGCCTGGGGTGCCTAAT
GAGTGAGCTAACTCACATTAATTGCGTTGCGCTCACTGCCCGCTTTCCAGTCGGGAAAC
CTGTCGTGCCAGCTGCATTAATGAATCGGCCAACGCGCGGGGAGAGGCGGTTTGCGTA
TTGGGCGCTCTTCCGCTTCCTCGCTCACTGACTCGCTGCGCTCGGTCGTTCGGCTGCGG
CGAGCGGTATCAGCTCACTCAAAGGCGGTAATACGGTTATCCACAGAATCAGGGGATA
ACGCAGGAAAGAACATGTGAGCAAAAGGCCAGCAAAAGGCCAGGAACCGTAAAAAG
GCCGCGTTGCTGGCGTTTTTCCATAGGCTCCGCCCCCCTGACGAGCATCACAAAAATCG
ACGCTCAAGTCAGAGGTGGCGAAACCCGACAGGACTATAAAGATACCAGGCGTTTCCC
CCTGGAAGCTCCCTCGTGCGCTCTCCTGTTCCGACCCTGCCGCTTACCGGATACCTGTC
CGCCTTTCTCCCTTCGGGAAGCGTGGCGCTTTCTCATAGCTCACGCTGTAGGTATCTCA
GTTCGGTGTAGGTCGTTCGCTCCAAGCTGGGCTGTGTGCACGAACCCCCCGTTCAGCC
CGACCGCTGCGCCTTATCCGGTAACTATCGTCTTGAGTCCAACCCGGTAAGACACGACT
TATCGCCACTGGCAGCAGCCACTGGTAACAGGATTAGCAGAGCGAGGTATGTAGGCGG
TGCTACAGAGTTCTTGAAGTGGTGGCCTAACTACGGCTACACTAGAAGAACAGTATTTG
GTATCTGCGCTCTGCTGAAGCCAGTTACCTTCGGAAAAAGAGTTGGTAGCTCTTGATCC
GGCAAACAAACCACCGCTGGTAGCGGTGGTTTTTTTGTTTGCAAGCAGCAGATTACGC
GCAGAAAAAAAGGATCTCAAGAAGATCCTTTGATCTTTTCTACGGGGTCTGACGCTCA
GTGGAACGAAAACTCACGTTAAGGGATTTTGGTCATGAGATTATCAAAAAGGATCTTC
ACCTAGATCCTTTTAAATTAAAAATGAAGTTTTAAATCAATCTAAAGTATATATGAGTAA
ACTTGGTCTGACAGTTACCAATGCTTAATCAGTGAGGCACCTATCTCAGCGATCTGTCT
ATTTCGTTCATCCATAGTTGCCTGACTCCCCGTCGTGTAGATAACTACGATACGGGAGG
GCTTACCATCTGGCCCCAGTGCTGCAATGATACCGCGAGACCCACGCTCACCGGCTCC
AGATTTATCAGCAATAAACCAGCCAGCCGGAAGGGCCGAGCGCAGAAGTGGTCCTGC
AACTTTATCCGCCTCCATCCAGTCTATTAATTGTTGCCGGGAAGCTAGAGTAAGTAGTTC
GCCAGTTAATAGTTTGCGCAACGTTGTTGCCATTGCTACAGGCATCGTGGTGTCACGCT
CGTCGTTTGGTATGGCTTCATTCAGCTCCGGTTCCCAACGATCAAGGCGAGTTACATGA
TCCCCCATGTTGTGCAAAAAAGCGGTTAGCTCCTTCGGTCCTCCGATCGTTGTCAGAAG
TAAGTTGGCCGCAGTGTTATCACTCATGGTTATGGCAGCACTGCATAATTCTCTTACTGT
CATGCCATCCGTAAGATGCTTTTCTGTGACTGGTGAGTACTCAACCAAGTCATTCTGAG
AATAGTGTATGCGGCGACCGAGTTGCTCTTGCCCGGCGTCAATACGGGATAATACCGCG
CCACATAGCAGAACTTTAAAAGTGCTCATCATTGGAAAACGTTCTTCGGGGCGAAAAC
TCTCAAGGATCTTACCGCTGTTGAGATCCAGTTCGATGTAACCCACTCGTGCACCCAAC
TGATCTTCAGCATCTTTTACTTTCACCAGCGTTTCTGGGTGAGCAAAAACAGGAAGGC
AAAATGCCGCAAAAAAGGGAATAAGGGCGACACGGAAATGTTGAATACTCATACTCTT
CCTTTTTCAATATTATTGAAGCATTTATCAGGGTTATTGTCTCATGAGCGGATACATATTT
GAATGTATTTAGAAAAATAAACAAATAGGGGTTCCGCGCACATTTCCCCGAAAAGT
GCCACCTGAC
U6promoter
PEgRNA
hSynpromoter
N-termPE2
N-termNpu
P2A-GFP-KASH
pLenti-hSyn-C-PE2-NpuC:
(SEQ ID NO: 737)
GTCGACGGATCGGGAGATCTCCCGATCCCCTATGGTGCACTCTCAGTACAATCTGCTCT
GATGCCGCATAGTTAAGCCAGTATCTGCTCCCTGCTTGTGTGTTGGAGGTCGCTGAGTA
GTGCGCGAGCAAAATTTAAGCTACAACAAGGCAAGGCTTGACCGACAATTGCATGAAG
AATCTGCTTAGGGTTAGGCGTTTTGCGCTGCTTCGCGATGTACGGGCCAGATATACGCG
TTGACATTGATTATTGACTAGTTATTAATAGTAATCAATTACGGGGTCATTAGTTCATAGC
CCATATATGGAGTTCCGCGTTACATAACTTACGGTAAATGGCCCGCCTGGCTGACCGCC
CAACGACCCCCGCCCATTGACGTCAATAATGACGTATGTTCCCATAGTAACGCCAATAG
GGACTTTCCATTGACGTCAATGGGTGGAGTATTTACGGTAAACTGCCCACTTGGCAGTA
CATCAAGTGTATCATATGCCAAGTACGCCCCCTATTGACGTCAATGACGGTAAATGGCC
CGCCTGGCATTATGCCCAGTACATGACCTTATGGGACTTTCCTACTTGGCAGTACATCTA
CGTATTAGTCATCGCTATTACCATGGTGATGCGGTTTTGGCAGTACATCAATGGGCGTGG
ATAGCGGTTTGACTCACGGGGATTTCCAAGTCTCCACCCCATTGACGTCAATGGGAGTT
TGTTTTGGCACCAAAATCAACGGGACTTTCCAAAATGTCGTAACAACTCCGCCCCATTG
ACGCAAATGGGCGGTAGGCGTGTACGGTGGGAGGTCTATATAAGCAGCGCGTTTTGCC
TGTACTGGGTCTCTCTGGTTAGACCAGATCTGAGCCTGGGAGCTCTCTGGCTAACTAGG
GAACCCACTGCTTAAGCCTCAATAAAGCTTGCCTTGAGTGCTTCAAGTAGTGTGTGCCC
GTCTGTTGTGTGACTCTGGTAACTAGAGATCCCTCAGACCCTTTTAGTCAGTGTGGAAA
ATCTCTAGCAGTGGCGCCCGAACAGGGACTTGAAAGCGAAAGGGAAACCAGAGGAGC
TCTCTCGACGCAGGACTCGGCTTGCTGAAGCGCGCACGGCAAGAGGCGAGGGGCGGC
GACTGGTGAGTACGCCAAAAATTTTGACTAGCGGAGGCTAGAAGGAGAGAGATGGGT
GCGAGAGCGTCAGTATTAAGCGGGGGAGAATTAGATCGCGATGGGAAAAAATTCGGTT
AAGGCCAGGGGGAAAGAAAAAATATAAATTAAAACATATAGTATGGGCAAGCAGGGAG
CTAGAACGATTCGCAGTTAATCCTGGCCTGTTAGAAACATCAGAAGGCTGTAGACAAAT
ACTGGGACAGCTACAACCATCCCTTCAGACAGGATCAGAAGAACTTAGATCATTATATA
ATACAGTAGCAACCCTCTATTGTGTGCATCAAAGGATAGAGATAAAAGACACCAAGGA
AGCTTTAGACAAGATAGAGGAAGAGCAAAACAAAAGTAAGACCACCGCACAGCAAGC
GGCCGCTGATCTTCAGACCTGGAGGAGGAGATATGAGGGACAATTGGAGAAGTGAATT
ATATAAATATAAAGTAGTAAAAATTGAACCATTAGGAGTAGCACCCACCAAGGCAAAGA
GAAGAGTGGTGCAGAGAGAAAAAAGAGCAGTGGGAATAGGAGCTTTGTTCCTTGGGT
TCTTGGGAGCAGCAGGAAGCACTATGGGCGCAGCGTCAATGACGCTGACGGTACAGG
CCAGACAATTATTGTCTGGTATAGTGCAGCAGCAGAACAATTTGCTGAGGGCTATTGAG
GCGCAACAGCATCTGTTGCAACTCACAGTCTGGGGCATCAAGCAGCTCCAGGCAAGA
ATCCTGGCTGTGGAAAGATACCTAAAGGATCAACAGCTCCTGGGGATTTGGGGTTGCT
CTGGAAAACTCATTTGCACCACTGCTGTGCCTTGGAATGCTAGTTGGAGTAATAAATCT
CTGGAACAGATTTGGAATCACACGACCTGGATGGAGTGGGACAGAGAAATTAACAATT
ACACAAGCTTAATACACTCCTTAATTGAAGAATCGCAAAACCAGCAAGAAAAGAATGA
ACAAGAATTATTGGAATTAGATAAATGGGCAAGTTTGTGGAATTGGTTTAACATAACAA
ATTGGCTGTGGTATATAAAATTATTCATAATGATAGTAGGAGGCTTGGTAGGTTTAAGAA
TAGTTTTTGCTGTACTTTCTATAGTGAATAGAGTTAGGCAGGGATATTCACCATTATCGTT
TCAGACCCACCTCCCAACCCCGAGGGGACCCGACAGGCCCGAAGGAATAGAAGAAGA
AGGTGGAGAGAGAGACAGAGACAGATCCATTCGATTAGTGAACGGATCGGCACTGCG
TGCGCCAATTCTGCAGACAAATGGCAGTATTCATCCACAATTTTAAAAGAAAAGGGGG
GATTGGGGGGTACAGTGCAGGGGAAAGAATAGTAGACATAATAGCAACAGACATACAA
ACTAAAGAATTACAAAAACAAATTACAAAAATTCAAAATTTTCGGGTTTATTACAGGGA
CAGCAGAGATCCAGTTTGGTTAATTAAGGTACCAGTGCAAGTGGGTTTTAGGACCAGG
ATGAGGCGGGGTGGGGGTGCCTACCTGACGACCGACCCCGACCCACTGGACAAGCAC
CCAACCCCCATTCCCCAAATTGCGCATCCCCTATCAGAGAGGGGGAGGGGAAACAGGA
TGCGGCGAGGCGCGTGCGCACTGCCAGCTTCAGCACCGCGGACAGTGCCTTCGCCCC
CGCCTGGCGGCGCGCGCCACCGCCGCCTCAGCACTGAAGGCGCGCTGACGTCACTCG
CCGGTCCCCCGCAAACTCCCCTTCCCGGCCACCTTGGTCGCGTCCGCGCCGCCGCCGG
CCCAGCCGGACCGCACCACGCGAGGCGCGAGATAGGGGGGCACGGGCGCGACCATCT
GCGCTGCGGCGCCGGCGACTCAGCGCTGCCTCAGTCTGCGGTGGGCAGCGGAGGAGT
CGTGTCGTGCCTGAGAGCGCAGTCGAGAATCTAGAGCGCTGCCACCATGAAACGGACAGC
CGACGGAAGCGAGTTCGAGTCACCAAAGAAGAAGCGGAAAGTCATCAAGATTGCTACACGG
AAATACCTGGGAAAGCAGAACGTGTACGACATCGGCGTGGAGCGGGATCACAACTTCGCCC
TGAAGAATGGCTTTATCGCCAGCAATTGCTTCGACTCCGTGGAAATCTCCGGCGTGGA
AGATCGGTTCAACGCCTCCCTGGGCACATACCACGATCTGCTGAAAATTATCAAG
GACAAGGACTTCCTGGACAATGAGGAAAACGAGGACATTCTGGAAGATATCGTG
CTGACCCTGACACTGTTTGAGGACAGAGAGATGATCGAGGAACGGCTGAAAACC
TATGCCCACCTGTTCGACGACAAAGTGATGAAGCAGCTGAAGCGGCGGAGATAC
ACCGGCTGGGGCAGGCTGAGCCGGAAGCTGATCAACGGCATCCGGGACAAGCA
GTCCGGCAAGACAATCCTGGATTTCCTGAAGTCCGACGGCTTCGCCAACAGAAA
CTTCATGCAGCTGATCCACGACGACAGCCTGACCTTTAAAGAGGACATCCAGAAA
GCCCAGGTGTCCGGCCAGGGCGATAGCCTGCACGAGCACATTGCCAATCTGGCC
GGCAGCCCCGCCATTAAGAAGGGCATCCTGCAGACAGTGAAGGTGGTGGACGAG
CTCGTGAAAGTGATGGGCCGGCACAAGCCCGAGAACATCGTGATCGAAATGGCC
AGAGAGAACCAGACCACCCAGAAGGGACAGAAGAACAGCCGCGAGAGAATGAA
GCGGATCGAAGAGGGCATCAAAGAGCTGGGCAGCCAGATCCTGAAAGAACACCC
CGTGGAAAACACCCAGCTGCAGAACGAGAAGCTGTACCTGTACTACCTGCAGAA
TGGGCGGGATATGTACGTGGACCAGGAACTGGACATCAACCGGCTGTCCGACTA
CGATGTGGACCATATCGTGCCTCAGAGCTTTCTGAAGGACGACTCCATCGACAAC
AAGGTGCTGACCAGAAGCGACAAGAACCGGGGCAAGAGCGACAACGTGCCCTC
CGAAGAGGTCGTGAAGAAGATGAAGAACTACTGGCGGCAGCTGCTGAACGCCAA
GCTGATTACCCAGAGAAAGTTCGACAATCTGACCAAGGCCGAGAGAGGCGGCCT
GAGCGAACTGGATAAGGCCGGCTTCATCAAGAGACAGCTGGTGGAAACCCGGCA
GATCACAAAGCACGTGGCACAGATCCTGGACTCCCGGATGAACACTAAGTACGA
CGAGAATGACAAGCTGATCCGGGAAGTGAAAGTGATCACCCTGAAGTCCAAGCT
GGTGTCCGATTTCCGGAAGGATTTCCAGTTTTACAAAGTGCGCGAGATCAACAAC
TACCACCACGCCCACGACGCCTACCTGAACGCCGTCGTGGGAACCGCCCTGATC
AAAAAGTACCCTAAGCTGGAAAGCGAGTTCGTGTACGGCGACTACAAGGTGTAC
GACGTGCGGAAGATGATCGCCAAGAGCGAGCAGGAAATCGGCAAGGCTACCGCC
AAGTACTTCTTCTACAGCAACATCATGAACTTTTTCAAGACCGAGATTACCCTGGC
CAACGGCGAGATCCGGAAGCGGCCTCTGATCGAGACAAACGGCGAAACCGGGG
AGATCGTGTGGGATAAGGGCCGGGATTTTGCCACCGTGCGGAAAGTGCTGAGCA
TGCCCCAAGTGAATATCGTGAAAAAGACCGAGGTGCAGACAGGCGGCTTCAGCA
AAGAGTCTATCCTGCCCAAGAGGAACAGCGATAAGCTGATCGCCAGAAAGAAGG
ACTGGGACCCTAAGAAGTACGGCGGCTTCGACAGCCCCACCGTGGCCTATTCTG
TGCTGGTGGTGGCCAAAGTGGAAAAGGGCAAGTCCAAGAAACTGAAGAGTGTG
AAAGAGCTGCTGGGGATCACCATCATGGAAAGAAGCAGCTTCGAGAAGAATCCC
ATCGACTTTCTGGAAGCCAAGGGCTACAAAGAAGTGAAAAAGGACCTGATCATCA
AGCTGCCTAAGTACTCCCTGTTCGAGCTGGAAAACGGCCGGAAGAGAATGCTGG
CCTCTGCCGGCGAACTGCAGAAGGGAAACGAACTGGCCCTGCCCTCCAAATATG
TGAACTTCCTGTACCTGGCCAGCCACTATGAGAAGCTGAAGGGCTCCCCCGAGG
ATAATGAGCAGAAACAGCTGTTTGTGGAACAGCACAAGCACTACCTGGACGAGAT
CATCGAGCAGATCAGCGAGTTCTCCAAGAGAGTGATCCTGGCCGACGCTAATCTG
GACAAAGTGCTGTCCGCCTACAACAAGCACCGGGATAAGCCCATCAGAGAGCAG
GCCGAGAATATCATCCACCTGTTTACCCTGACCAATCTGGGAGCCCCTGCCGCCT
TCAAGTACTTTGACACCACCATCGACCGGAAGAGGTACACCAGCACCAAAGAGG
TGCTGGACGCCACCCTGATCCACCAGAGCATCACCGGCCTGTACGAGACACGGA
TCGACCTGTCTCAGCTGGGAGGTGACTCTGGCGGCTCAAAAAGAACCGCCGACG
GCAGCGAATTCGAGCCCAAGAAGAAGAGGAAAGTCTAAACGCGTTAAGTCGACAA
TCAACCTCTGGATTACAAAATTTGTGAAAGATTGACTGGTATTCTTAACTATGTTGCTCC
TTTTACGCTATGTGGATACGCTGCTTTAATGCCTTTGTATCATGCTATTGCTTCCCGTATG
GCTTTCATTTTCTCCTCCTTGTATAAATCCTGGTTGCTGTCTCTTTATGAGGAGTTGTGG
CCCGTTGTCAGGCAACGTGGCGTGGTGTGCACTGTGTTTGCTGACGCAACCCCCACTG
GTTGGGGCATTGCCACCACCTGTCAGCTCCTTTCCGGGACTTTCGCTTTCCCCCTCCCT
ATTGCCACGGCGGAACTCATCGCCGCCTGCCTTGCCCGCTGCTGGACAGGGGCTCGGC
TGTTGGGCACTGACAATTCCGTGGTGTTGTCGGGGAAATCATCGTCCTTTCCTTGGCTG
CTCGCCTGTGTTGCCACCTGGATTCTGCGCGGGACGTCCTTCTGCTACGTCCCTTCGGC
CCTCAATCCAGCGGACCTTCCTTCCCGCGGCCTGCTGCCGGCTCTGCGGCCTCTTCCGC
GTCTTCGCCTTCGCCCTCAGACGAGTCGGATCTCCCTTTGGGCCGCCTCCCCGCGTCGA
CTTTAAGACCAATGACTTACAAGGCAGCTGTAGATCTTAGCCACTTTTTAAAAGAAAAG
GGGGGACTGGAAGGGCTAATTCACTCCCAACGAAGACAAGATCTGCTTTTTGCTTGTA
CTGGGTCTCTCTGGTTAGACCAGATCTGAGCCTGGGAGCTCTCTGGCTAACTAGGGAA
CCCACTGCTTAAGCCTCAATAAAGCTTGCCTTGAGTGCTTCAAGTAGTGTGTGCCCGTC
TGTTGTGTGACTCTGGTAACTAGAGATCCCTCAGACCCTTTTAGTCAGTGTGGAAAATC
TCTAGCAGGGCCCGTTTAAACCCGCTGATCAGCCTCGACTGTGCCTTCTAGTTGCCAGC
CATCTGTTGTTTGCCCCTCCCCCGTGCCTTCCTTGACCCTGGAAGGTGCCACTCCCACT
GTCCTTTCCTAATAAAATGAGGAAATTGCATCGCATTGTCTGAGTAGGTGTCATTCTATT
CTGGGGGGTGGGGTGGGGCAGGACAGCAAGGGGGAGGATTGGGAAGACAATAGCAG
GCATGCTGGGGATGCGGTGGGCTCTATGGCTTCTGAGGCGGAAAGAACCAGCTGGGGC
TCTAGGGGGTATCCCCACGCGCCCTGTAGCGGCGCATTAAGCGCGGCGGGTGTGGTGG
TTACGCGCAGCGTGACCGCTACACTTGCCAGCGCCCTAGCGCCCGCTCCTTTCGCTTTC
TTCCCTTCCTTTCTCGCCACGTTCGCCGGCTTTCCCCGTCAAGCTCTAAATCGGGGGCT
CCCTTTAGGGTTCCGATTTAGTGCTTTACGGCACCTCGACCCCAAAAAACTTGATTAGG
GTGATGGTTCACGTAGTGGGCCATCGCCCTGATAGACGGTTTTTCGCCCTTTGACGTTG
GAGTCCACGTTCTTTAATAGTGGACTCTTGTTCCAAACTGGAACAACACTCAACCCTAT
CTCGGTCTATTCTTTTGATTTATAAGGGATTTTGCCGATTTCGGCCTATTGGTTAAAAAAT
GAGCTGATTTAACAAAAATTTAACGCGAATTAATTCTGTGGAATGTGTGTCAGTTAGGG
TGTGGAAAGTCCCCAGGCTCCCCAGCAGGCAGAAGTATGCAAAGCATGCATCTCAATT
AGTCAGCAACCAGGTGTGGAAAGTCCCCAGGCTCCCCAGCAGGCAGAAGTATGCAAA
GCATGCATCTCAATTAGTCAGCAACCATAGTCCCGCCCCTAACTCCGCCCATCCCGCCC
CTAACTCCGCCCAGTTCCGCCCATTCTCCGCCCCATGGCTGACTAATTTTTTTTATTTATG
CAGAGGCCGAGGCCGCCTCTGCCTCTGAGCTATTCCAGAAGTAGTGAGGAGGCTTTTT
TGGAGGCCTAGGCTTTTGCAAAAAGCTCCCGGGAGCTTGTATATCCATTTTCGGATCTG
ATCAGCACGTGTTGACAATTAATCATCGGCATAGTATATCGGCATAGTATAATACGACAA
GGTGAGGAACTAAACCATGGCCAAGTTGACCAGTGCCGTTCCGGTGCTCACCGCGCGC
GACGTCGCCGGAGCGGTCGAGTTCTGGACCGACCGGCTCGGGTTCTCCCGGGACTTCG
TGGAGGACGACTTCGCCGGTGTGGTCCGGGACGACGTGACCCTGTTCATCAGCGCGGT
CCAGGACCAGGTGGTGCCGGACAACACCCTGGCCTGGGTGTGGGTGCGCGGCCTGGA
CGAGCTGTACGCCGAGTGGTCGGAGGTCGTGTCCACGAACTTCCGGGACGCCTCCGG
GCCGGCCATGACCGAGATCGGCGAGCAGCCGTGGGGGCGGGAGTTCGCCCTGCGCGA
CCCGGCCGGCAACTGCGTGCACTTCGTGGCCGAGGAGCAGGACTGACACGTGCTACG
AGATTTCGATTCCACCGCCGCCTTCTATGAAAGGTTGGGCTTCGGAATCGTTTTCCGGG
ACGCCGGCTGGATGATCCTCCAGCGCGGGGATCTCATGCTGGAGTTCTTCGCCCACCCC
AACTTGTTTATTGCAGCTTATAATGGTTACAAATAAAGCAATAGCATCACAAATTTCACA
AATAAAGCATTTTTTTCACTGCATTCTAGTTGTGGTTTGTCCAAACTCATCAATGTATCT
TATCATGTCTGTATACCGTCGACCTCTAGCTAGAGCTTGGCGTAATCATGGTCATAGCTG
TTTCCTGTGTGAAATTGTTATCCGCTCACAATTCCACACAACATACGAGCCGGAAGCAT
AAAGTGTAAAGCCTGGGGTGCCTAATGAGTGAGCTAACTCACATTAATTGCGTTGCGCT
CACTGCCCGCTTTCCAGTCGGGAAACCTGTCGTGCCAGCTGCATTAATGAATCGGCCA
ACGCGCGGGGAGAGGCGGTTTGCGTATTGGGCGCTCTTCCGCTTCCTCGCTCACTGAC
TCGCTGCGCTCGGTCGTTCGGCTGCGGCGAGCGGTATCAGCTCACTCAAAGGCGGTAA
TACGGTTATCCACAGAATCAGGGGATAACGCAGGAAAGAACATGTGAGCAAAAGGCC
AGCAAAAGGCCAGGAACCGTAAAAAGGCCGCGTTGCTGGCGTTTTTCCATAGGCTCCG
CCCCCCTGACGAGCATCACAAAAATCGACGCTCAAGTCAGAGGTGGCGAAACCCGAC
AGGACTATAAAGATACCAGGCGTTTCCCCCTGGAAGCTCCCTCGTGCGCTCTCCTGTTC
CGACCCTGCCGCTTACCGGATACCTGTCCGCCTTTCTCCCTTCGGGAAGCGTGGCGCTT
TCTCATAGCTCACGCTGTAGGTATCTCAGTTCGGTGTAGGTCGTTCGCTCCAAGCTGGG
CTGTGTGCACGAACCCCCCGTTCAGCCCGACCGCTGCGCCTTATCCGGTAACTATCGTC
TTGAGTCCAACCCGGTAAGACACGACTTATCGCCACTGGCAGCAGCCACTGGTAACAG
GATTAGCAGAGCGAGGTATGTAGGCGGTGCTACAGAGTTCTTGAAGTGGTGGCCTAAC
TACGGCTACACTAGAAGAACAGTATTTGGTATCTGCGCTCTGCTGAAGCCAGTTACCTT
CGGAAAAAGAGTTGGTAGCTCTTGATCCGGCAAACAAACCACCGCTGGTAGCGGTGG
TTTTTTTGTTTGCAAGCAGCAGATTACGCGCAGAAAAAAAGGATCTCAAGAAGATCCT
TTGATCTTTTCTACGGGGTCTGACGCTCAGTGGAACGAAAACTCACGTTAAGGGATTTT
GGTCATGAGATTATCAAAAAGGATCTTCACCTAGATCCTTTTAAATTAAAAATGAAGTTT
TAAATCAATCTAAAGTATATATGAGTAAACTTGGTCTGACAGTTACCAATGCTTAATCAG
TGAGGCACCTATCTCAGCGATCTGTCTATTTCGTTCATCCATAGTTGCCTGACTCCCCGT
CGTGTAGATAACTACGATACGGGAGGGCTTACCATCTGGCCCCAGTGCTGCAATGATAC
CGCGAGACCCACGCTCACCGGCTCCAGATTTATCAGCAATAAACCAGCCAGCCGGAAG
GGCCGAGCGCAGAAGTGGTCCTGCAACTTTATCCGCCTCCATCCAGTCTATTAATTGTT
GCCGGGAAGCTAGAGTAAGTAGTTCGCCAGTTAATAGTTTGCGCAACGTTGTTGCCATT
GCTACAGGCATCGTGGTGTCACGCTCGTCGTTTGGTATGGCTTCATTCAGCTCCGGTTC
CCAACGATCAAGGCGAGTTACATGATCCCCCATGTTGTGCAAAAAAGCGGTTAGCTCC
TTCGGTCCTCCGATCGTTGTCAGAAGTAAGTTGGCCGCAGTGTTATCACTCATGGTTAT
GGCAGCACTGCATAATTCTCTTACTGTCATGCCATCCGTAAGATGCTTTTCTGTGACTGG
TGAGTACTCAACCAAGTCATTCTGAGAATAGTGTATGCGGCGACCGAGTTGCTCTTGCC
CGGCGTCAATACGGGATAATACCGCGCCACATAGCAGAACTTTAAAAGTGCTCATCATT
GGAAAACGTTCTTCGGGGCGAAAACTCTCAAGGATCTTACCGCTGTTGAGATCCAGTT
CGATGTAACCCACTCGTGCACCCAACTGATCTTCAGCATCTTTTACTTTCACCAGCGTTT
CTGGGTGAGCAAAAACAGGAAGGCAAAATGCCGCAAAAAAGGGAATAAGGGCGACA
CGGAAATGTTGAATACTCATACTCTTCCTTTTTCAATATTATTGAAGCATTTATCAGGGTT
ATTGTCTCATGAGCGGATACATATTTGAATGTATTTAGAAAAATAAACAAATAGGGG
TTCCGCGCACATTTCCCCGAAAAGTGCCACCTGAC
hSynpromoter
C-termNpu
C-termwtCas9
pLenti-U6-DNMT1_nicking_sgRNA:
(SEQ ID NO: 738)
TAACAAATTGGCTGTGGTATATAAAATTATTCATAATGATAGTAGGAGGCTTGGTAGGTT
TAAGAATAGTTTTTGCTGTACTTTCTATAGTGAATAGAGTTAGGCAGGGATATTCACCAT
TATCGTTTCAGACCCACCTCCCAACCCCGAGGGGACCCAGAGAGGGCCTATTTCCCATG
ATTCCTTCATATTTGCATATACGATACAAGGCTGTTAGAGAGATAATTAGAATTAATTTGACTGT
AAACACAAAGATATTAGTACAAAATACGTGACGTAGAAAGTAATAATTTCTTGGGTAGTTTGCA
GTTTTAAAATTATGTTTTAAAATGGACTATCATATGCTTACCGTAACTTGAAAGTATTTCGATTTC
TTGGCTTTATATATCTTGTGGAAAGGACGAAACACCGCCGCGCGCGCGAAAAAGCCGGTTT
TAGAGCTAGAAATAGCAAGTTAAAATAAGGCTAGTCCGTTATCAACTTGAAAAAGTGGCA
CCGAGTCGGTGCTTTTTTAAGCTTGGCGTAACTAGATCTTGAGACAAATGGCAGTATTC
ATCCACAATTTTAAAAGAAAAGGGGGGATTGGGGGGTACAGTGCAGGGGAAAGAATA
GTAGACATAATAGCAACAGACATACAAACTAAAGAATTACAAAAACAAATTACAAAAA
TTCAAAATTTTCGGGTTTATTACAGGGACAGCAGAGATCCACTTTGGCGCCGGCTCGAG
GGGGCCCGGGTGCAAAGATGGATAAAGTTTTAAACAGAGAGGAATCTTTGCAGCTAAT
GGACCTTCTAGGTCTTGAAAGGAGTGGGAATTGGCTCCGGTGCCCGTCAGTGGGCAGA
GCGCACATCGCCCACAGTCCCCGAGAAGTTGGGGGGAGGGGTCGGCAATTGATCCGG
TGCCTAGAGAAGGTGGCGCGGGGTAAACTGGGAAAGTGATGTCGTGTACTGGCTCCGC
CTTTTTCCCGAGGGTGGGGGAGAACCGTATATAAGTGCAGTAGTCGCCGTGAACGTTCT
TTTTCGCAACGGGTTTGCCGCCAGAACACAGGTAAGTGCCGTGTGTGGTTCCCGCGGG
CCTGGCCTCTTTACGGGTTATGGCCCTTGCGTGCCTTGAATTACTTCCACCTGGCTGCA
GTACGTGATTCTTGATCCCGAGCTTCGGGTTGGAAGTGGGTGGGAGAGTTCGAGGCCT
TGCGCTTAAGGAGCCCCTTCGCCTCGTGCTTGAGTTGAGGCCTGGCCTGGGCGCTGGG
GCCGCCGCGTGCGAATCTGGTGGCACCTTCGCGCCTGTCTCGCTGCTTTCGATAAGTCT
CTAGCCATTTAAAATTTTTGATGACCTGCTGCGACGCTTTTTTTCTGGCAAGATAGTCTT
GTAAATGCGGGCCAAGATCTGCACACTGGTATTTCGGTTTTTGGGGCCGCGGGCGGCG
ACGGGGCCCGTGCGTCCCAGCGCACATGTTCGGCGAGGCGGGGCCTGCGAGCGCGGC
CACCGAGAATCGGACGGGGGTAGTCTCAAGCTGGCCGGCCTGCTCTGGTGCCTGGCCT
CGCGCCGCCGTGTATCGCCCCGCCCTGGGCGGCAAGGCTGGCCCGGTCGGCACCAGTT
GCGTGAGCGGAAAGATGGCCGCTTCCCGGCCCTGCTGCAGGGAGCTCAAAATGGAGG
ACGCGGCGCTCGGGAGAGCGGGCGGGTGAGTCACCCACACAAAGGAAAAGGGCCTT
TCCGTCCTCAGCCGTCGCTTCATGTGACTCCACGGAGTACCGGGCGCCGTCCAGGCAC
CTCGATTAGTTCTCGAGCTTTTGGAGTACGTCGTCTTTAGGTTGGGGGGAGGGGTTTTA
TGCGATGGAGTTTCCCCACACTGAGTGGGTGGAGACTGAAGTTAGGCCAGCTTGGCAC
TTGATGTAATTCTCCTTGGAATTTGCCCTTTTTGAGTTTGGATCTTGGTTCATTCTCAAG
CCTCAGACAGTGGTTCAAAGTTTTTTTCTTCCATTTCAGGTGTCGTGACGTACGGCCAC
CATGACCGAGTACAAGCCCACGGTGCGCCTCGCCACCCGCGACGACGTCCCCAGGGC
CGTACGCACCCTCGCCGCCGCGTTCGCCGACTACCCCGCCACGCGCCACACCGTCGAT
CCGGACCGCCACATCGAGCGGGTCACCGAGCTGCAAGAACTCTTCCTCACGCGCGTCG
GGCTCGACATCGGCAAGGTGTGGGTCGCGGACGACGGCGCCGCCGTGGCGGTCTGGA
CCACGCCGGAGAGCGTCGAAGCGGGGGCGGTGTTCGCCGAGATCGGCCCGCGCATGG
CCGAGTTGAGCGGTTCCCGGCTGGCCGCGCAGCAACAGATGGAAGGCCTCCTGGCGC
CGCACCGGCCCAAGGAGCCCGCGTGGTTCCTGGCCACCGTCGGAGTCTCGCCCGACC
ACCAGGGCAAGGGTCTGGGCAGCGCCGTCGTGCTCCCCGGAGTGGAGGCGGCCGAGC
GCGCCGGGGTGCCCGCCTTCCTGGAGACCTCCGCGCCCCGCAACCTCCCCTTCTACGA
GCGGCTCGGCTTCACCGTCACCGCCGACGTCGAGGTGCCCGAAGGACCGCGCACCTG
GTGCATGACCCGCAAGCCCGGTGCCTGAACGCGTTAAGTCGACAATCAACCTCTGGAT
TACAAAATTTGTGAAAGATTGACTGGTATTCTTAACTATGTTGCTCCTTTTACGCTATGT
GGATACGCTGCTTTAATGCCTTTGTATCATGCTATTGCTTCCCGTATGGCTTTCATTTTCT
CCTCCTTGTATAAATCCTGGTTGCTGTCTCTTTATGAGGAGTTGTGGCCCGTTGTCAGGC
AACGTGGCGTGGTGTGCACTGTGTTTGCTGACGCAACCCCCACTGGTTGGGGCATTGC
CACCACCTGTCAGCTCCTTTCCGGGACTTTCGCTTTCCCCCTCCCTATTGCCACGGCGG
AACTCATCGCCGCCTGCCTTGCCCGCTGCTGGACAGGGGCTCGGCTGTTGGGCACTGA
CAATTCCGTGGTGTTGTCGGGGAAATCATCGTCCTTTCCTTGGCTGCTCGCCTGTGTTG
CCACCTGGATTCTGCGCGGGACGTCCTTCTGCTACGTCCCTTCGGCCCTCAATCCAGCG
GACCTTCCTTCCCGCGGCCTGCTGCCGGCTCTGCGGCCTCTTCCGCGTCTTCGCCTTCG
CCCTCAGACGAGTCGGATCTCCCTTTGGGCCGCCTCCCCGCGTCGACTTTAAGACCAAT
GACTTACAAGGCAGCTGTAGATCTTAGCCACTTTTTAAAAGAAAAGGGGGGACTGGAA
GGGCTAATTCACTCCCAACGAAGACAAGATCTGCTTTTTGCTTGTACTGGGTCTCTCTG
GTTAGACCAGATCTGAGCCTGGGAGCTCTCTGGCTAACTAGGGAACCCACTGCTTAAG
CCTCAATAAAGCTTGCCTTGAGTGCTTCAAGTAGTGTGTGCCCGTCTGTTGTGTGACTC
TGGTAACTAGAGATCCCTCAGACCCTTTTAGTCAGTGTGGAAAATCTCTAGCAGTACGT
ATAGTAGTTCATGTCATCTTATTATTCAGTATTTATAACTTGCAAAGAAATGAATATCAGA
GAGTGAGAGGAACTTGTTTATTGCAGCTTATAATGGTTACAAATAAAGCAATAGCATCA
CAAATTTCACAAATAAAGCATTTTTTTCACTGCATTCTAGTTGTGGTTTGTCCAAACTCA
TCAATGTATCTTATCATGTCTGGCTCTAGCTATCCCGCCCCTAACTCCGCCCATCCCGCC
CCTAACTCCGCCCAGTTCCGCCCATTCTCCGCCCCATGGCTGACTAATTTTTTTTATTTAT
GCAGAGGCCGAGGCCGCCTCGGCCTCTGAGCTATTCCAGAAGTAGTGAGGAGGCTTTT
TTGGAGGCCTAGGGACGTACCCAATTCGCCCTATAGTGAGTCGTATTACGCGCGCTCAC
TGGCCGTCGTTTTACAACGTCGTGACTGGGAAAACCCTGGCGTTACCCAACTTAATCG
CCTTGCAGCACATCCCCCTTTCGCCAGCTGGCGTAATAGCGAAGAGGCCCGCACCGAT
CGCCCTTCCCAACAGTTGCGCAGCCTGAATGGCGAATGGGACGCGCCCTGTAGCGGCG
CATTAAGCGCGGCGGGTGTGGTGGTTACGCGCAGCGTGACCGCTACACTTGCCAGCGC
CCTAGCGCCCGCTCCTTTCGCTTTCTTCCCTTCCTTTCTCGCCACGTTCGCCGGCTTTCC
CCGTCAAGCTCTAAATCGGGGGCTCCCTTTAGGGTTCCGATTTAGTGCTTTACGGCACC
TCGACCCCAAAAAACTTGATTAGGGTGATGGTTCACGTAGTGGGCCATCGCCCTGATAG
ACGGTTTTTCGCCCTTTGACGTTGGAGTCCACGTTCTTTAATAGTGGACTCTTGTTCCA
AACTGGAACAACACTCAACCCTATCTCGGTCTATTCTTTTGATTTATAAGGGATTTTGCC
GATTTCGGCCTATTGGTTAAAAAATGAGCTGATTTAACAAAAATTTAACGCGAATTTTA
ACAAAATATTAACGCTTACAATTTAGGTGGCACTTTTCGGGGAAATGTGCGCGGAACCC
CTATTTGTTTATTTTTCTAAATACATTCAAATATGTATCCGCTCATGAGACAATAACCCTG
ATAAATGCTTCAATAATATTGAAAAAGGAAGAGTATGAGTATTCAACATTTCCGTGTCGC
CCTTATTCCCTTTTTTGCGGCATTTTGCCTTCCTGTTTTTGCTCACCCAGAAACGCTGGT
GAAAGTAAAAGATGCTGAAGATCAGTTGGGTGCACGAGTGGGTTACATCGAACTGGAT
CTCAACAGCGGTAAGATCCTTGAGAGTTTTCGCCCCGAAGAACGTTTTCCAATGATGA
GCACTTTTAAAGTTCTGCTATGTGGCGCGGTATTATCCCGTATTGACGCCGGGCAAGAG
CAACTCGGTCGCCGCATACACTATTCTCAGAATGACTTGGTTGAGTACTCACCAGTCAC
AGAAAAGCATCTTACGGATGGCATGACAGTAAGAGAATTATGCAGTGCTGCCATAACC
ATGAGTGATAACACTGCGGCCAACTTACTTCTGACAACGATCGGAGGACCGAAGGAGC
TAACCGCTTTTTTGCACAACATGGGGGATCATGTAACTCGCCTTGATCGTTGGGAACCG
GAGCTGAATGAAGCCATACCAAACGACGAGCGTGACACCACGATGCCTGTAGCAATGG
CAACAACGTTGCGCAAACTATTAACTGGCGAACTACTTACTCTAGCTTCCCGGCAACA
ATTAATAGACTGGATGGAGGCGGATAAAGTTGCAGGACCACTTCTGCGCTCGGCCCTTC
CGGCTGGCTGGTTTATTGCTGATAAATCTGGAGCCGGTGAGCGTGGGTCTCGCGGTATC
ATTGCAGCACTGGGGCCAGATGGTAAGCCCTCCCGTATCGTAGTTATCTACACGACGGG
GAGTCAGGCAACTATGGATGAACGAAATAGACAGATCGCTGAGATAGGTGCCTCACTG
ATTAAGCATTGGTAACTGTCAGACCAAGTTTACTCATATATACTTTAGATTGATTTAAAA
CTTCATTTTTAATTTAAAAGGATCTAGGTGAAGATCCTTTTTGATAATCTCATGACCAAA
ATCCCTTAACGTGAGTTTTCGTTCCACTGAGCGTCAGACCCCGTAGAAAAGATCAAAG
GATCTTCTTGAGATCCTTTTTTTCTGCGCGTAATCTGCTGCTTGCAAACAAAAAAACCA
CCGCTACCAGCGGTGGTTTGTTTGCCGGATCAAGAGCTACCAACTCTTTTTCCGAAGGT
AACTGGCTTCAGCAGAGCGCAGATACCAAATACTGTTCTTCTAGTGTAGCCGTAGTTAG
GCCACCACTTCAAGAACTCTGTAGCACCGCCTACATACCTCGCTCTGCTAATCCTGTTA
CCAGTGGCTGCTGCCAGTGGCGATAAGTCGTGTCTTACCGGGTTGGACTCAAGACGAT
AGTTACCGGATAAGGCGCAGCGGTCGGGCTGAACGGGGGGTTCGTGCACACAGCCCA
GCTTGGAGCGAACGACCTACACCGAACTGAGATACCTACAGCGTGAGCTATGAGAAAG
CGCCACGCTTCCCGAAGGGAGAAAGGCGGACAGGTATCCGGTAAGCGGCAGGGTCGG
AACAGGAGAGCGCACGAGGGAGCTTCCAGGGGGAAACGCCTGGTATCTTTATAGTCCT
GTCGGGTTTCGCCACCTCTGACTTGAGCGTCGATTTTTGTGATGCTCGTCAGGGGGGCG
GAGCCTATGGAAAAACGCCAGCAACGCGGCCTTTTTACGGTTCCTGGCCTTTTGCTGG
CCTTTTGCTCACATGTTCTTTCCTGCGTTATCCCCTGATTCTGTGGATAACCGTATTACCG
CCTTTGAGTGAGCTGATACCGCTCGCCGCAGCCGAACGACCGAGCGCAGCGAGTCAGT
GAGCGAGGAAGCGGAAGAGCGCCCAATACGCAAACCGCCTCTCCCCGCGCGTTGGCC
GATTCATTAATGCAGCTGGCACGACAGGTTTCCCGACTGGAAAGCGGGCAGTGAGCGC
AACGCAATTAATGTGAGTTAGCTCACTCATTAGGCACCCCAGGCTTTACACTTTATGCTT
CCGGCTCGTATGTTGTGTGGAATTGTGAGCGGATAACAATTTCACACAGGAAACAGCT
ATGACCATGATTACGCCAAGCGCGCAATTAACCCTCACTAAAGGGAACAAAAGCTGGA
GCTGCAAGCTTAATGTAGTCTTATGCAATACTCTTGTAGTCTTGCAACATGGTAACGATG
AGTTAGCAACATGCCTTACAAGGAGAGAAAAAGCACCGTGCATGCCGATTGGTGGAA
GTAAGGTGGTACGATCGTGCCTTATTAGGAAGGCAACAGACGGGTCTGACATGGATTG
GACGAACCACTGAATTGCCGCATTGCAGAGATATTGTATTTAAGTGCCTAGCTCGATAC
ATAAACGGGTCTCTCTGGTTAGACCAGATCTGAGCCTGGGAGCTCTCTGGCTAACTAGG
GAACCCACTGCTTAAGCCTCAATAAAGCTTGCCTTGAGTGCTTCAAGTAGTGTGTGCCC
GTCTGTTGTGTGACTCTGGTAACTAGAGATCCCTCAGACCCTTTTAGTCAGTGTGGAAA
ATCTCTAGCAGTGGCGCCCGAACAGGGACTTGAAAGCGAAAGGGAAACCAGAGGAGC
TCTCTCGACGCAGGACTCGGCTTGCTGAAGCGCGCACGGCAAGAGGCGAGGGGCGGC
GACTGGTGAGTACGCCAAAAATTTTGACTAGCGGAGGCTAGAAGGAGAGAGATGGGT
GCGAGAGCGTCAGTATTAAGCGGGGGAGAATTAGATCGCGATGGGAAAAAATTCGGTT
AAGGCCAGGGGGAAAGAAAAAATATAAATTAAAACATATAGTATGGGCAAGCAGGGAG
CTAGAACGATTCGCAGTTAATCCTGGCCTGTTAGAAACATCAGAAGGCTGTAGACAAAT
ACTGGGACAGCTACAACCATCCCTTCAGACAGGATCAGAAGAACTTAGATCATTATATA
ATACAGTAGCAACCCTCTATTGTGTGCATCAAAGGATAGAGATAAAAGACACCAAGGA
AGCTTTAGACAAGATAGAGGAAGAGCAAAACAAAAGTAAGACCACCGCACAGCAAGC
GGCCGCTGATCTTCAGACCTGGAGGAGGAGATATGAGGGACAATTGGAGAAGTGAATT
ATATAAATATAAAGTAGTAAAAATTGAACCATTAGGAGTAGCACCCACCAAGGCAAAGA
GAAGAGTGGTGCAGAGAGAAAAAAGAGCAGTGGGAATAGGAGCTTTGTTCCTTGGGT
TCTTGGGAGCAGCAGGAAGCACTATGGGCGCAGCGTCAATGACGCTGACGGTACAGG
CCAGACAATTATTGTCTGGTATAGTGCAGCAGCAGAACAATTTGCTGAGGGCTATTGAG
GCGCAACAGCATCTGTTGCAACTCACAGTCTGGGGCATCAAGCAGCTCCAGGCAAGA
ATCCTGGCTGTGGAAAGATACCTAAAGGATCAACAGCTCCTGGGGATTTGGGGTTGCT
CTGGAAAACTCATTTGCACCACTGCTGTGCCTTGGAATGCTAGTTGGAGTAATAAATCT
CTGGAACAGATTTGGAATCACACGACCTGGATGGAGTGGGACAGAGAAATTAACAATT
ACACAAGCTTAATACACTCCTTAATTGAAGAATCGCAAAACCAGCAAGAAAAGAATGA
ACAAGAATTATTGGAATTAGATAAATGGGCAAGTTTGTGGAATTGGTTTAACA
U6promoter
sgRNA

[1440] Amino acid sequences of Moloney murine leukemia virus reverse transcriptase (M-MLV RT) variants used herein.

PE1 M-MLV RT:
(SEQ ID NO: 739)
TLNIEDEYRLHETSKEPDVSLGSTWLSDFPQAWAETGGMGLAVRQAPLII
PLKATSTPVSIKQYPMSQEARLGIKPHIQRLLDQGILVPCQSPWNTPLLP
VKKPGTNDYRPVQDLREVNKRVEDIHPTVPNPYNLLSGLPPSHQWYTVLD
LKDAFFCLRLHPTSQPLFAFEWRDPEMGISGQLTWTRLPQGFKNSPTLFD
EALHRDLADFRIQHPDLILLQYVDDLLLAATSELDCQQGTRALLQTLGNL
GYRASAKKAQICQKQVKYLGYLLKEGQRWLTEARKETVMGQPTPKTPRQL
REFLGTAGFCRLWIPGFAEMAAPLYPLTKTGTLFNWGPDQQKAYQEIKQA
LLTAPALGLPDLTKPFELFVDEKQGYAKGVLTQKLGPWRRPVAYLSKKLD
PVAAGWPPCLRMVAAIAVLTKDAGKLTMGQPLVILAPHAVEALVKQPPDR
WLSNARMTHYQALLLDTDRVQFGPVVALNPATLLPLPEEGLQHNCLDILA
EAHGTRPDLTDQPLPDADHTWYTDGSSLLQEGQRKAGAAVTTETEVIWAK
ALPAGTSAQRAELIALTQALKMAEGKKLNVYTDSRYAFATAHIHGEIYRR
RGLLTSEGKEIKNKDEILALLKALFLPKRLSIIHCPGHQKGHSAEARGNR
MADQAARKAAITETPDTSTLLIENSSP
M3 M-MLV RT (D200N, T330P, L603W)
(see Baranauskas et al.¹⁸²):
(SEQ ID NO: 740)
TLNIEDEYRLHETSKEPDVSLGSTWLSDFPQAWAETGGMGLAVRQAPLII
PLKATSTPVSIKQYPMSQEARLGIKPHIQRLLDQGILVPCQSPWNTPLLP
VKKPGTNDYRPVQDLREVNKRVEDIHPTVPNPYNLLSGLPPSHQWYTVLD
LKDAFFCLRLHPTSQPLFAFEWRDPEMGISGQLTWTRLPQGFKNSPTLFN
EALHRDLADFRIQHPDLILLQYVDDLLLAATSELDCQQGTRALLQTLGNL
GYRASAKKAQICQKQVKYLGYLLKEGQRWLTEARKETVMGQPTPKTPRQL
REFLGTAGFCRLWIPGFAEMAAPLYPLTKPGTLFNWGPDQQKAYQEIKQA
LLTAPALGLPDLTKPFELFVDEKQGYAKGVLTQKLGPWRRPVAYLSKKLD
PVAAGWPPCLRMVAAIAVLTKDAGKLTMGQPLVILAPHAVEALVKQPPDR
WLSNARMTHYQALLLDTDRVQFGPVVALNPATLLPLPEEGLQHNCLDILA
EAHGTRPDLTDQPLPDADHTWYTDGSSLLQEGQRKAGAAVTTETEVIWAK
ALPAGTSAQRAELIALTQALKMAEGKKLNVYTDSRYAFATAHIHGEIYRR
RGWLTSEGKEIKNKDEILALLKALFLPKRLSIIHCPGHQKGHSAEARGNR
MADQAARKAAITETPDTSTLLIENSSP
PE2 M-MLV RT (D200N, T306K, W313F,
T330P, L603W):
(SEQ ID NO: 741)
TLNIEDEYRLHETSKEPDVSLGSTWLSDFPQAWAETGGMGLAVRQAPLII
PLKATSTPVSIKQYPMSQEARLGIKPHIQRLLDQGILVPCQSPWNTPLLP
VKKPGTNDYRPVQDLREVNKRVEDIHPTVPNPYNLLSGLPPSHQWYTVLD
LKDAFFCLRLHPTSQPLFAFEWRDPEMGISGQLTWTRLPQGFKNSPTLFN
EALHRDLADFRIQHPDLILLQYVDDLLLAATSELDCQQGTRALLQTLGNL
GYRASAKKAQICQKQVKYLGYLLKEGQRWLTEARKETVMGQPTPKTPRQL
REFLGKAGFCRLFIPGFAEMAAPLYPLTKPGTLFNWGPDQQKAYQEIKQA
LLTAPALGLPDLTKPFELFVDEKQGYAKGVLTQKLGPWRRPVAYLSKKLD
PVAAGWPPCLRMVAAIAVLTKDAGKLTMGQPLVILAPHAVEALVKQPPDR
WLSNARMTHYQALLLDTDRVQFGPVVALNPATLLPLPEEGLQHNCLDILA
EAHGTRPDLTDQPLPDADHTWYTDGSSLLQEGQRKAGAAVTTETEVIWAK
ALPAGTSAQRAELIALTQALKMAEGKKLNVYTDSRYAFATAHIHGEIYRR
RGWLTSEGKEIKNKDEILALLKALFLPKRLSIIHCPGHQKGHSAEARGNR
MADQAARKAAITETPDTSTLLIENSSP
M3-deadRT M-MLV RT:
(SEQ ID NO: 742)
TLNIEDEYRLHETSKEPDVSLGSTWLSDFPQAWAETGGMGLAVRQAPLII
PLKATSTPVSIKQYPMSQEARLGIKPHIQRLLDQGILVPCQSPWNTPLLP
VKLPGTNDYSPVQDLREVNKRVEDIHPTVPNPYNLLSGLPPSHQWYTVLD
LKDAFFCLRLHPTSQPLFAFEWRDPEMGISGQLTWTRLPQGFKNSPTLFN
EALHRDLADFRIQHPDLILLQYVDDLLLAATSELDCQQGTRALLQTLGNL
GYRASAKKAQICQKQVKYLGYLLKEGQRWLTEARKETVMGQPTPKTPRQL
REFLGTAGFCRLWIPGFAEMAAPLYPLTKPGTLFNWGPDQQKAYQEIKQA
LLTAPALGLPDLTKPFELFVDEKQGYAKGVLTQKLGPWRRPVAYLSKKLD
PVAAGWPPCLRMVAAIAVLTKDAGKLTMGQPLVILAPHAVEALVKQPPDR
WLSNARMTHYQALLLDTDRVQFGPVVALNPATLLPLPEEGLQHNCLDILA
EAHGTRPDLTDQPLPDADHTWYTDGSSLLQEGQRKAGAAVTTETEVIWAK
ALPAGTSAQRAELIALTQALKMAEGKKLNVYTDSRYAFATAHIHGEIYRR
RGWLTSEGKEIKNKDEILALLKALFLPKRLSIIHCPGHQKGHSAEARGNR
MADQAARKAAITETPDTSTLLIENSSP

### REFERENCES FOR EXAMPLE 12

[1441] Each of the following references are cited in Example 12, each of which are incorporated herein by reference.
[1442] 1. Landrum, M. J. et al. ClinVar: public archive of interpretations of clinically relevant variants. Nucleic Acids Res. 44, D862-D868 (2016).
[1443] 2. Jinek, M. et al. A Programmable Dual-RNA-Guided DNA Endonuclease in Adaptive Bacterial Immunity. Science 337, 816-821 (2012).
[1444] 3. Cong, L. et al. Multiplex Genome Engineering Using CRISPR/Cas Systems. Science 339, 819-823 (2013).
[1445] 4. Mali, P. et al. RNA-Guided Human Genome Engineering via Cas9. Science 339,823-826 (2013).
[1446] 5. Yang, H. et al. One-Step Generation of Mice Carrying Reporter and Conditional Alleles by CRISPR/Cas-Mediated Genome Engineering. Cell 154,1370-1379 (2013).
[1447] 6. Kim, S., Kim, D., Cho, S. W., Kim, J. & Kim, J.-S. Highly efficient RNA-guided genome editing in human cells via delivery of purified Cas9 ribonucleoproteins. Genome Res. 24, 1012-1019 (2014).
[1448] 7. Orlando, S. J. et al. Zinc-finger nuclease-driven targeted integration into mammalian genomes using donors with limited chromosomal homology. Nucleic Acids Res. 38, e152-e152 (2010).
[1449] 8. Tsai, S. Q. et al. GUIDE-seq enables genome-wide profiling of off-target cleavage by CRISPRCas nucleases. Nat. Biotechnol. 33,187-197 (2015).
[1450] 9. Suzuki, K. et al. In vivo genome editing via CRISPR/Cas9 mediated homology-independent targeted integration. Nature 540, 144-149 (2016).
[1451] 10. Kosicki, M., Tomberg, K. & Bradley, A. Repair of double-strand breaks induced by CRISPR-Cas9 leads to large deletions and complex rearrangements. Nat. Biotechnol. 36, 765-771 (2018).
[1452] 11. Haapaniemi, E., Botla, S., Persson, J., Schmierer, B. & Taipale, J. CRISPR-Cas9 genome editing induces a p53-mediated DNA damage response. Nat. Med. 24, 927-930 (2018).
[1453] 12. Ihry, R. J. et al. p53 inhibits CRISPR-Cas9 engineering in human pluripotent stem cells. Nat. Med. 24, 939-946 (2018).
[1454] 13. Rouet, P., Smih, F. & Jasin, M. Expression of a site-specific endonuclease stimulates homologous recombination in mammalian cells. Proc. Natl. Acad. Sci. 91, 6064-6068 (1994).
[1455] 14. Chapman, J. R., Taylor, M. R. G. & Boulton, S. J. Playing the end game: DNA double-strand break repair pathway choice. Mol. Cell 47, 497-510 (2012).
[1456] 15. Cox, D. B. T., Platt, R. J. & Zhang, F. Therapeutic genome editing: prospects and challenges. Nat. Med. 21, 121-131 (2015).
[1457] 16. Paquet, D. et al. Efficient introduction of specific homozygous and heterozygous mutations using CRISPR/Cas9. Nature 533, 125-129 (2016).
[1458] 17. Chu, V. T. et al. Increasing the efficiency of homology-directed repair for CRISPR-Cas9-induced precise gene editing in mammalian cells. Nat. Biotechnol. 33,543-548 (2015).
[1459] 18. Maruyama, T. et al. Increasing the efficiency of precise genome editing with CRISPR-Cas9 by inhibition of nonhomologous end joining. Nat. Biotechnol. 33,538-542 (2015).
[1460] 19. Rees, H. A., Yeh, W.-H. & Liu, D. R. Development of hRad51-Cas9 nickase fusions that mediate HDR without double-stranded breaks. Nat. Commun. 10, 1-12 (2019).
[1461] 20. Shen, M. W. et al. Predictable and precise template-free CRISPR editing of pathogenic variants. Nature 563, 646-651 (2018).
[1462] 21. Rees, H. A. & Liu, D. R. Base editing: precision chemistry on the genome and transcriptome of living cells. Nat. Rev. Genet. 19, 770 (2018).
[1463] 22. Komor, A. C., Kim, Y. B., Packer, M. S., Zuris, J. A. & Liu, D. R. Programmable editing of a target base in genomic DNA without double-stranded DNA cleavage. Nature 533, 420-424 (2016).
[1464] 23. Gaudelli, N. M. et al. Programmable base editing of A●T to G●C in genomic DNA without DNA cleavage. Nature 551, 464-471 (2017).
[1465] 24. Gao, X. et al. Treatment of autosomal dominant hearing loss by in vivo delivery of genome editing agents. Nature 553, 217-221 (2018).
[1466] 25. Ingram, V. M. A specific chemical difference between the globins of normal human and sickle-cell anaemia haemoglobin. Nature 178, 792-794 (1956).
[1467] 26. Myerowitz, R. & Costigan, F. C. The major defect in Ashkenazi Jews with Tay-Sachs disease is an insertion in the gene for the alpha-chain of beta-hexosaminidase. J. Biol. Chem. 263, 18587-18589 (1988).
[1468] 27. Zielenski, J. Genotype and Phenotype in Cystic Fibrosis. Respiration 67, 117-133 (2000).
[1469] 28. Mead, S. et al. A Novel Protective Prion Protein Variant that Colocalizes with Kuru Exposure. N. Engl. J. Med. 361, 2056-2065 (2009).
[1470] 29. Marraffini, L. A. & Sontheimer, E. J. CRISPR interference limits horizontal gene transfer in staphylococci by targeting DNA. Science 322, 1843-1845 (2008).
[1471] 30. Barrangou, R. et al. CRISPR provides acquired resistance against viruses in prokaryotes. Science 315, 1709-1712 (2007).
[1472] 31. Jiang, F. & Doudna, J. A. CRISPR-Cas9 Structures and Mechanisms. Annu. Rev. Biophys. 46, 505-529 (2017).
[1473] 32. Hille, F. et al. The Biology of CRISPR-Cas: Backward and Forward. Cell 172, 1239-1259 (2018).
[1474] 33. Luan, D. D., Korman, M. H., Jakubczak, J. L. & Eickbush, T. H. Reverse transcription of R2Bm RNA is primed by a nick at the chromosomal target site: a mechanism for non-LTR retrotransposition. Cell 72, 595-605 (1993).
[1475] 34. Liu, Y., Kao, H.-I. & Bambara, R. A. Flap endonuclease 1: a central component of DNA metabolism. Annu. Rev. Biochem. 73, 589-615 (2004).
[1476] 35. Richardson, C. D., Ray, G. J., DeWitt, M. A., Curie, G. L. & Corn, J. E. Enhancing homology directed genome editing by catalytically active and inactive CRISPR-Cas9 using asymmetric donor DNA. Nat. Biotechnol. 34, 339-344 (2016).
[1477] 36. Qi, L. S. et al. Repurposing CRISPR as an RNA-Guided Platform for Sequence-Specific Control of Gene Expression. Cell 152, 1173-1183 (2013).
[1478] 37. Shechner, D. M., Hacisuleyman, E., Younger, S. T. & Rinn, J. L. Multiplexable, locus-specific targeting of long RNAs with CRISPR-Display. Nat. Methods 12, 664-670 (2015).
[1479] 38. Tang, W., Hu, J. H. & Liu, D. R. Aptazyme-embedded guide RNAs enable ligand-responsive genome editing and transcriptional activation. Nat. Commun. 8, 15939 (2017).
[1480] 39. Jinek, M. et al. Structures of Cas9 Endonucleases Reveal RNA-Mediated Conformational Activation. Science 343, 1247997 (2014).
[1481] 40. Nishimasu, H. et al. Crystal Structure of Cas9 in Complex with Guide RNA and Target DNA. Cell 156, 935-949 (2014).
[1482] 41. Jiang, F., Zhou, K., Ma, L., Gressel, S. & Doudna, J. A. A Cas9-guide RNA complex preorganized for target DNA recognition. Science 348, 1477-1481 (2015).
[1483] 42. Baranauskas, A. et al. Generation and characterization of new highly thermostable and processive M-MuLV reverse transcriptase variants. Protein Eng. Des. Sel. 25, 657-668 (2012).
[1484] 43. Gerard, G. F. et al. The role of template-primer in protection of reverse transcriptase from thermal inactivation. Nucleic Acids Res. 30, 3118-3129 (2002).
[1485] 44. Arezi, B. & Hogrefe, H. Novel mutations in Moloney Murine Leukemia Virus reverse transcriptase increase thermostability through tighter binding to template-primer. Nucleic Acids Res. 37, 473-481 (2009).
[1486] 45. Kotewicz, M. L., Sampson, C. M., D'Alessio, J. M. & Gerard, G. F. Isolation of cloned Moloney murine leukemia virus reverse transcriptase lacking ribonuclease H activity. Nucleic Acids Res. 16, 265-277 (1988).
[1487] 46. Thuronyi, B. W. et al. Continuous evolution of base editors with expanded target compatibility and improved activity. Nat. Biotechnol. (2019). doi:10.1038/s41587-019-0193-0
[1488] 47. Kim, Y. B. et al. Increasing the genome-targeting scope and precision of base editing with engineered Cas9-cytidine deaminase fusions. Nat. Biotechnol. 35, 371-376 (2017).
[1489] 48. Koblan, L. W. et al. Improving cytidine and adenine base editors by expression optimization and ancestral reconstruction. Nat. Biotechnol. (2018). doi:10.1038/nbt.4172
[1490] 49. Kleinstiver, B. P. et al. High-fidelity CRISPR-Cas9 nucleases with no detectable genome-wide off target effects. Nature 529, 490-495 (2016).
[1491] 50. Zuo, E. et al. Cytosine base editor generates substantial off-target single-nucleotide variants in mouse embryos. Science 364, 289-292 (2019).
[1492] 51. Jin, S. et al. Cytosine, but not adenine, base editors induce genome-wide off-target mutations in rice. Science 364, 292-295 (2019).
[1493] 52. Kim, D., Kim, D., Lee, G., Cho, S.-I. & Kim, J.-S. Genome-wide target specificity of CRISPR RNA guided adenine base editors. Nat. Biotechnol. 37, 430-435 (2019).
[1494] 53. Grunewald, J. et al. Transcriptome-wide off-target RNA editing induced by CRISPR-guided DNA base editors. Nature 569, 433-437 (2019).
[1495] 54. Zhou, C. et al. Off-target RNA mutation induced by DNA base editing and its elimination by mutagenesis. Nature 571, 275-278 (2019).
[1496] 55. Rees, H. A., Wilson, C., Doman, J. L. & Liu, D. R. Analysis and minimization of cellular RNA editing by DNA adenine base editors. Sci. Adv. 5, eaax5717 (2019).
[1497] 56. Ostertag, E. M. & Kazazian Jr, H. H. Biology of Mammalian L1 Retrotransposons. Annu. Rev. Genet. 35, 501-538 (2001).
[1498] 57. Griffiths, D. J. Endogenous retroviruses in the human genome sequence. Genome Biol. 2, REVIEWS1017 (2001).
[1499] 58. Berkhout, B., Jebbink, M. & Zsiros, J. Identification of an Active Reverse Transcriptase Enzyme Encoded by a Human Endogenous HERV-K Retrovirus. J. Virol. 73, 2365-2375 (1999).
[1500] 59. Halvas, E. K., Svarovskaia, E. S. & Pathak, V. K. Role of Murine Leukemia Virus Reverse Transcriptase Deoxyribonucleoside Triphosphate-Binding Site in Retroviral Replication and In Vivo Fidelity. J. Virol. 74, 10349-10358 (2000).
[1501] 60. Dever, D. P. et al. CRISPR/Cas9 Beta-globin Gene Targeting in Human Hematopoietic Stem Cells. Nature 539, 384-389 (2016).
[1502] 61. Park, S. H. et al. Highly efficient editing of the β-globin gene in patient-derived hematopoietic stem and progenitor cells to treat sickle cell disease. Nucleic Acids Res. doi:10.1093/nar/gkz475
[1503] 62. Collinge, J. Prion diseases of humans and animals: their causes and molecular basis. Annu. Rev. Neurosci. 24, 519-550 (2001).
[1504] 63. Asante, E. A. et al. A naturally occurring variant of the human prion protein completely prevents prion disease. Nature 522, 478-481 (2015).
[1505] 64. Zettler, J., Schutz, V. & Mootz, H. D. The naturally split Npu DnaE intein exhibits an extraordinarily high rate in the protein trans-splicing reaction. FEBS Lett. 583, 909-914 (2009).
[1506] 65. Kugler, S., Kilic, E. & Bahr, M. Human synapsin 1 gene promoter confers highly neuron-specific long-term transgene expression from an adenoviral vector in the adult rat brain depending on the transduced area. Gene Ther. 10, 337-347 (2003).
[1507] 66. de Felipe, P., Hughes, L. E., Ryan, M. D. & Brown, J. D. Co-translational, intraribosomal cleavage of polypeptides by the foot-and-mouth disease virus 2A peptide. J. Biol. Chem. 278, 11441-11448 (2003).

### Example 13—Cell Data Recording and Lineage Tracing by Pe

### Background

[1508] Genome modification can be used to study and record cellular processes and development. Linking cellular events, like cell division or signaling cascade activation, to DNA sequence modifications stores cellular histories as interpretable DNA sequence changes that would describe whether specific cellular events had taken place. DNA editing is necessary for these applications because DNA is faithfully passed from one cell to the next in a way that RNA and proteins are not. Information relating to cellular state and lineage are in general lost when modifications are made to short-lived protein and RNA molecules. Recording cellular events within a single cell is a powerful way to understand how disease states are initiated, maintained, and changed relative to healthy controls. The ability to probe these questions has implications for understanding the development of cancer, neurological disease, and a host of other important problems in human health. prime editing (PE) provides a system for creating targeted and sequence-specified genomic insertions, deletions, or mutations. Repeated modification of a DNA target that can be sequenced by targeted amplicon sequencing and/or RNA sequencing (which is of particular value for single cell recording experiments) can be used to record a host of important biological processes, including activation of signaling cascades, metabolic states, and cellular differentiation programs. Connecting internal and external cellular signals to sequence modifications in the genome is, in theory, possible for any signal for which a signal responsive promoter exists. It is believed that PE enables a greatly expanded toolkit for probing the cellular lineage and the signaling histories of eukaryotic and prokaryotic cells in both cultured conditions and in vivo.

[1509] Previous Standards

[1510] Targeted sequence insertion, deletion, or mutation can be used to study a number of important biological questions including lineage tracing and recording of cellular stimuli. The current toolkit for generating these signatures in the genome is limited. Mutagenesis of target loci has been developed to date using both DNA-nucleases and base editors.

[1511] CRISPR/Cas9 nuclease cutting of target sequences generates stochastic sequence changes to generate a large number of insertion or deletion (indel) products. The large number of sequence outcomes that arise from Cas9 cutting allows for clear determination of sequences that have been cut by the nuclease. The ability to distinguish cut versus non-cut sequences has been used in two predominant ways.

[1512] First, the expression of the Cas9 nuclease and/or its single guide RNA (sgRNA) have been connected to cellular signals. Additionally, whether that signal has occurred based on sequence modifications to the Cas9 targeted genomic locus has been recorded. However, this approach is limited because each signal requires a unique target locus, which makes tracking the relative timing of multiple signals difficult to interpret. Another limitation to this approach is that multiple target loci are desired for a specific sgRNA because generation of an indel often severely hinders additional mutagenesis of the target locus; this often means that pre-engineered target loci are integrated into cells for editing instead of direct mutagenesis of endogenous loci.

[1513] Second, Cas9 indels have been used to track cellular lineages. As described herein, the large number of possible indel states generated by Cas9 nuclease activity allows for the generation of cellular developmental trees that suggest which cells have arisen from one another across time. This approach is a powerful way to understand how cells arise from one another and has been used to help identify unique cell states and types across developmental time by performing RNA sequencing on selected cellular pools. This approach cannot independently report on cellular signaling events, their order, and may have biases when reporting on pre-cursor versus terminally differentiated cell states.

[1514] Cas9 nuclease mediated lineage tracing and signal recording are powerful techniques that come with some important caveats. Signal recording with Cas9 nuclease is often very technically challenging. Cas9 cutting exhausts the target locus (repeated cutting is difficult once an indel is generated) making it difficult to record long term stimuli at the single cell level. The kinetics of Cas9 cutting can be tuned to enable longer term recording events though the ability to integrate the order, intensity, and duration of multiple stimuli remains a very challenging technical problem that may not be achievable with this tool. Cas9 lineage tracing experiments have been incredibly powerful but suffer from minor technical challenges of sequence collapse due to simultaneous Cas9 cuts at a target locus. These lineage-tracing experiments require editing of pre-designed target loci, limiting the flexibility of this approach.

[1515] DNA base editing has also been used to track cellular signaling events. Base editing is not well suited for lineage tracing due to the low number of outcome states generated by an editing event relative to the number of states generated by Cas9 indels; however, the pre-defined nature of the sequence modifications made by a base editor are particularly useful for tracking internal and external cellular stimuli. As described herein, either base editor or sgRNA expression can be connected to a particular biological or chemical stimulus. Base editing activity has been used to track a large number of individual stimuli in both mammalian and bacterial cells. This approach has also been used to track consecutive stimuli where a first editing event was necessary before a second edit could take place.

[1516] Base editing signal recording is an important first step for the field, but it has a number of limitations. One such limitation is that base editing exhausts its target after editing, limiting the dynamic range of the technique. This means that using endogenous targets for recording events is often difficult and limited to recording bulk activities instead of activity at the single cell level. An alternative to this is the introduction of a pre-designed repetitive recording locus though this has not been performed to date. There are also issues with two-signal recording. These two signal-recording experiments only report on the presence of the second stimulus after a first; it does not report which stimulus happened first or how long the stimuli were present. This fundamentally limits the biological understanding gleaned from the experiment.

[1517] It has been proposed that PE lineage tracing can do both lineage tracing and cellular signaling recording by modifying genomic target sequences as well as integrated pre-designed sequences. PE uses a synthetic fusion protein comprising a Cas9 nickase fragment (often the SpCas9 H840A variant) and a reverse transcriptase (RT) domain, along with an engineered prime editing guide RNA (PEgRNA). Together, these components target a specific genomic sequence and install a pre-determined edit. Since the PEgRNA specifies both the target genomic sequence and the editing outcome, highly specific and controlled genome modification can be achieved simultaneously using multiple PEgRNAs within the same cell. Accessible genome modifications include all single nucleotide substitution, small to medium size sequence insertions, and small to medium size sequence deletions. The versatility of this genome editing technology should enable temporally coupled, signal-specific recording within cells.

[1518] Utility of PE Lineage and Cell Signaling Recording

[1519] Recording cellular signaling can be accomplished in a number of ways. One important first application of this approach is to connect DNA modification events to cell cycle associated signals like the expression of cyclins, CDKs, or other proteins specific to phases of the cellular life span one could generate a cellular clock. A cellular clock allows researchers to understand the order of various signals being received and processed by individual cells. A molecular clock would also enable the determination of long-term signaling versus short-term bursts of signaling. Using prime editing components that can only edit once a cell cycle could also lead to a molecular clock. If editing can only proceed once a cell cycle without continued DNA modification (perhaps by not nicking the non-edited DNA strand) one could imagine a system that only can be edited by a second targeting PEsgRNA in a subsequent cell division. PE is particularly useful as a cellular clock as it can repeatedly insert, delete, or mutate loci in a predetermined way with insertions being particularly valuable as repeated, regular insertions can be made at any target genomic locus.

[1520] Another important application related to recording cellular signals is the parallel recording of a large number of cellular inputs. Linking cellular signaling events to DNA modification enables recording of whether such a signaling event has occurred. Similar to Cas9 nuclease-based or base editing-based recording systems, recording of cellular events can be tethered to gRNA or editor expression. Unlike these other approaches, lineage prime editing should be able to record the order, intensity, and duration of signaling events without requiring strict sequence motifs for ordered editing. Indeed, lineage prime editing should be able to integrate the cellular counter described above with signal specific insertions, deletions, or mutations to study the order, intensity, and duration of biological signals. Due to the programmable nature of prime editing, this approach can be achieved at genomic loci pre-existing in the target cell of interest (whether this is in bacteria, mice, rats, monkeys, pigs, humans, zebrafish, C. elegans, etc.). It is important to note as well that prime editing recording installs barcodes in a guide RNA dependent manner, the number of inputs is limited to the number of signals for which there are reliable signal specific guide RNA expression cassettes (which should be very high due to the ability to tether these expressions to the activity of RNA Pol II promoters). The number of recordable signals scales linearly with the number of PEgRNAs needed.

[1521] PE can also be used to trace cellular lineages. Repeated sequence modification can be used to generate unique cellular barcodes to track individual cells. The arrays of barcodes, their order, and size can all be used to infer cellular lineages in a way that can be complementary to the large number of indel states generated by Cas9 nuclease.

[1522] Prime Editing Methodology for Repeated Sequence Modification

[1523] A number of distinct modalities for repeated sequence modification using prime editing (PE) were envisioned: DNA mutagenesis; sequence deletion; and, sequence insertion. Notably, these applications can be used on either pre-existing genomic DNA targets or on pre-designed DNA sequences that researchers integrate into target cells. These techniques of serial sequence modification have value for recording information and for designed or stochastic modification of target loci in a continuous manner. Serial targeted locus modification may be particularly useful for generating libraries of variants in various hosts.

[1524] Repeated sequence mutation can be used to alter either genomic DNA or pre-designed integrated DNA sequences in an iterative manner to report on cellular signaling events. In this paradigm, mutations installed by PE gRNA activity will correspond to the presence of a cellular signal. These point mutations could install PAM motifs necessary for serial editing events, as well as point mutations that correspond to the presence of specific signals. This system would require gRNA design prior to use as each successive guide RNA will use a novel protospacer; however, it could be especially powerful for examining individual or small numbers of stimuli of particular interest. Installation of these mutations could be dependent on individual biological stimuli or could be connected to consistent cellular processes that would mark cellular time. The sequences below correspond to SEQ ID NOs: 743, 744, 744, and 745.

Target genomic DNA sequence
CGTATCGGTAACTGATCCGATGGAAAGCCAGTTCAGAACCG
Target sequence post edit #1 (install G and T)
CGTATCGGTAACTGATCCGATGGAATGCCAGGTCAGAACCG
Target sequence post edit #1 (use AGG PAM)
CGTATCGGTAACTGATCCGATGGAATGCCAGGTCAGAACCG
Target sequence post edit #2 (install G and A)
CGTATCGGTAACTGATCCGATGGAATGCCAGGTCAAAACGG

[1525] Another similar PE guide RNA-intensive method is the repeated deletion of target sequences. Removal of individual sequences from a target locus would allow for the ability to reconstruct signaling events through the loss of DNA motifs. Design of PEgRNAs that delete successive sequences would enable the tracking of consecutive signals. This would allow researchers to identify instances where one signal followed another, which would allow researchers to probe which signaling events happen in which order. Such a system has been tested using CAMERA; however, this required pre-selection of particular loci with unique sequence requirements. Successive sequence deletion using PE would allow for the paralleled recording of pairwise events in individual cells as no specific sequence determinants are required. This would allow researchers the ability to probe pairwise signaling events in a multiplexed manner inside any target cell of interest. The sequences below correspond to SEQ ID NOs: 746, 747, and 748.

Example target DNA sequence
CGTATCGGTAACTGATCCGATGGAAAGCCAGTTCAGAACCG
Target sequence post edit #1 (delete AAA)
CGTATCGGTAACTGATCCGATGGGCCAGTTCAGAACCG
Target sequence post edit #2 (delete GCC)
CGTATCGGTAACTGATCCGATGGAGTTCAGAACCG

[1526] Sequence insertion is a third approach for the tracking cellular signaling events. Some variants of this strategy are less PEgRNA-dependent than mutagenesis or deletion. A number of different insertion strategies exist-insertion of short sequences, insertion of protospacers, insertion of a protospacer and a barcode, insertion of novel homology sequences, and insertion of homology sequences with a barcode.

[1527] Insertion of short repetitive sequences is a way to incrementally increase the size of a target sequence to measure the passage of time in a cell. In this system insertion of 5 or more nucleotides of repetitive sequence can cause repeat expansion in connection to either the passage of time or the continued presence of a pre-determined stimulus. The locus-agnostic nature of lineage PE again enables paralleled tracking of multiple unique sequence expansions in connection with discrete biological signals. This should enable measuring of the intensity of multiple biological signals across cellular time in individual cells. The sequences below correspond to SEQ ID NOs: 749, 750, and 751.

Example target DNA sequence
genomic sequence-CGTATCGTATCGTATCGTATTGG-
genomic sequence
Target sequence post edit #1 (install CGTAT)
genomic sequence-CGTATCGTATCGTATCGTATCGTATTGG-
genomic sequence
Target sequence post edit #2 (install CGTAT)
genomic sequence-CGTATCGTATCGTATCGTATCGTATTGG-
genomic sequence

[1528] Insertion of different short sequences would require a handful of PEgRNAs in a manner similar to the deletional space. The number of signals being recorded and the size of the inserted sequence would determine the number of combinations of PEgRNAs needed. One challenge with recording multiple sequences in this system would be the different efficiencies of each PEgRNA at inserting its cargo sequence.

[1529] Insertion of protospacers as indicators of cellular signals is enticing though technical challenges may infringe on the efficiency of this approach. Single PEgRNA systems will be challenging to use because PEgRNA cassettes would be substrates for themselves, causing insertions into the PEgRNA that compromise the efficiency and fidelity of successive edits. This same problem persists for two or three PEgRNA systems, as each guide is a substrate for another, enabling insertion of other sequences into the guide cassette itself, which could lead to inappropriate insertion of protospacer sequences in connection with the wrong signal. These protospacer insertion systems are also difficult to imagine with the inclusion of barcode sequences. Single PEgRNA barcode systems would simply write over the barcodes used, removing the data stored in the first edit. Multiple guide systems again suffer from insertions into other PEgRNA expression constructs, limiting its utility (especially in vivo). The sequences in FIG. 90 top to bottom, left to right correspond to SEQ ID NOs: 752, 752, 753, 754, 754, 755, and 756.

[1530] Insertion of homology sequences (i.e., sequences 3′ of the Cas9 nick location), and especially homology sequences with associated barcodes, appear to be particularly useful lineage PE strategies. This system avoids the issues associated with protospacer insertion by ensuring that successive rounds of editing result in the insertion of a barcode from a PEgRNA cassette that cannot be modified by other PEgRNA editing events in the same cell. The barcoding system is valuable as multiple barcodes can be associated with a given stimulus. This system preserves the majority of the target protospacer but alters the seed sequence, PAM, and downstream adjacent nucleotides. This enables multiple signals to be connected to one editing locus without significant re-designing of the PEgRNAs being used. This strategy would enable multiplexed barcode insertion in response to a large number of cellular stimuli (either internal or external) at a single locus. It could enable recording of intensity, duration, and order of as many signals as there exist unique barcodes (which can be designed with multiple N nucleotides to generate 4\hat{ }N possible barcodes; i.e. a 5-nt barcode would enable recording of 4\hat{ }5 or 1024 unique signals at once). This system could be used both in vitro and in vivo.

### REFERENCES CITED IN EXAMPLE 13

[1531] Each of the following references are incorporated herein by reference.
[1532] 1. Recording development with single cell dynamic lineage tracing. Aaron McKenna, James A. Gagnon.
[1533] 2. Whole-organism lineage tracing by combinatorial and cumulative genome editing.Mckenna et al. Science. 2016 Jul. 29; 353(6298):aaf7907. doi10.1126/science.aaf7907. Epub 2016 May 26.
[1534] 3. Molecular recording of mammalian embryogenesis. Chan et al. 2019. Nature. Jun; 570(7759):77-82. doi: 10.1038/s41586-019-1184-5. Epub 2019 May 13.

[1535] Example 14—Modulating Biomolecule Activity and/or Localization by Pe

[1536] The subcellular localization and modification states of biomolecules regulate their activities. Specific biological functions like transcriptional control, cellular metabolism, and signal transduction cascades are all carefully orchestrated in particular locations within the cell. As such, modulating the cellular localization and modification states of proteins represents a potential therapeutic strategy for the treatment of disease. Some existing therapeutics have been developed to alter the localization of target proteins. For example, farnesylation inhibitors are designed to prevent lipidation and membrane targeting of important oncogenic proteins like KRAS. Similarly, small-molecule-induced ubiquitination of target proteins directs them to the proteasome for degradation. The ability to traffic proteins to these and other unique cellular compartments provides an opportunity to alter a number of biological processes. It is proposed herein that the use of prime editing (PE) to install genetically encoded handles for altering the modification state and the subcellular trafficking of biomolecules with a genetically encoded signal (e.g. proteins, lipids, sugars, and nucleic acids) for the purposes of therapeutics.

[1537] PE is a genome editing technology that enables the installation, deletion, or replacement of short DNA sequences into any genomic locus targetable with a Cas9 enzyme. Using this technology, one could in principle install or remove important DNA, RNA, or protein coding sequences that change the activities of these important biomolecules. More specifically, prime editing could be used to install motifs, or signals, that change the localization or modification properties of biomolecules. Some examples include modification to: protein amino acid sequences; motifs for post translational modifications; RNA motifs that change folding or localization; and, installation of DNA sequences that change the local chromatin state or architecture of the surrounding DNA.

[1538] One target biomolecule for PE-mediated modification is DNA. Modifications to DNA could be made to install a number of DNA sequences that change the accessibility of the target locus. Chromatin accessibility controls gene transcriptional output. Installation of marks to recruit chromatin compacting enzymes should decrease the transcriptional output of neighboring genes, while installation of sequences associated with chromatin opening should make regions more accessible and in turn increase transcription. Installation of more complex sequence motifs that mirror native regulatory sequences should provide more nuanced and biologically sensitive control than the currently available dCas9 fusions to different epigenetic reader, writer, or eraser enzymes—tools that typically install large numbers of a single type of mark that may not have a particular biological antecedent. Installation of sequences that will bring two loci into close proximity, or bring loci into contact with the nuclear membrane, should also alter the transcriptional output of those loci as has been demonstrated in the burgeoning field of 3-D genomic architecture.

[1539] Modifications to RNAs can also be made to alter their activity by changing their cellular localization, interacting partners, structural dynamics, or thermodynamics of folding. Installation of motifs that will cause translational pausing or frameshifting could change the abundance of mRNA species through various mRNA processing mechanisms. Modifying consensus splice sequences would also alter the abundance and prevalence of different RNA species. Changing the relative ratio of different splice isoforms would predictably lead to a change in the ratio of protein translation products, and this could be used to alter many biological pathways. For instance, shifting the balance of mitochondrial versus nuclear DNA repair proteins would alter the resilience of different cancers to chemotherapeutic reagents. Furthermore, RNAs could be modified with sequences that enable binding to novel protein targets. A number of RNA aptamers have been developed that bind with high affinity to cellular proteins. Installation of one of these aptamers could be used to either sequester different RNA species through binding to a protein target that will prevent their translation, biological activity, or to bring RNA species to specific subcellular compartments. Biomolecule degradation is another class of localization modification. For example, RNA methylation is used to regulate RNAs within the cell. Consensus motifs for methylation could be introduced into target RNA coding sequences with PE. RNAs could also be modified to include sequences that direct nonsense mediated decay machinery or other nucleic acid metabolism pathways to degrade the target RNA species would change the pool of RNAs in a cell. Additionally, RNA species could be modified to alter their aggregation state. Sequences could be installed on single RNAs of interest or multiple RNAs to generate RNA tangles that would render them ineffective substrates for translation or signaling.

[1540] Modifications to proteins via post-translational modification (PTM) also represent an important class of biomolecule manipulation that can be carried out with PE. As with RNA species, changing the abundance of proteins in a cell is an important capability of PE. Editing can be done to install stop codons in an open reading frame—this will eliminate full-length product from being produced by the edited DNA sequence. Alternatively, peptide motifs can be installed that cause the rate of protein degradation to be altered for a target protein. Installation of degradation tags into a gene body could be used to alter the abundance of a protein in a cell. Moreover, introduction of degrons that are induced by small molecules could enable temporal control over protein degradation. This could have important implications for both research and therapeutics as researchers could readily assess whether small molecule-mediated therapeutic protein degradation of a given target was a viable therapeutic strategy. Protein motifs could also be installed to change the subcellular localization of a protein. Amino acid motifs can be installed to preferentially traffic proteins to a number of subcellular compartments including the nucleus, mitochondria, cell membrane, peroxisome, lysosome, proteasome, exosome, and others.

[1541] Installing or destroying motifs modified by PTM machinery can alter protein post-translational modifications. Phosphorylation, ubiquitylation, glycosylation, lipidation (e.g. farnesylation, myristoylation, palmitoylation, prenylation, GPI anchors), hydroxylation, methylation, acetylation, crotonylation, SUMOylation, disulfide bond formations, side chain bond cleavage events, polypeptide backbone cleavage events (proteolysis), and a number of other protein PTMs have been identified. These PTMs change protein function, often by changing subcellular localization. Indeed, kinases often activate downstream signaling cascades via phosphorylation events. Removal of the target phosphosite would prevent signal transduction. The ability to site-specifically ablate or install any PTM motif while retaining full-length protein expression would be an important advance for both basic research and therapeutics. The sequence installation scope and target window of PE make it well suited for broad PTM modification space.

[1542] Removal of lipidation sites should prevent the trafficking of proteins to cell membranes. A major limitation to current therapeutics that target post-translational modification processes is their specificity. Farnesyl transferase inhibitors have been tested extensively for their ability to eliminate KRAS localization at cell membranes. Unfortunately, global inhibition of farnesylation comes with numerous off target effects that have prevented broad use of these small molecules. Similarly, specific inhibition of protein kinases with small molecules can be very challenging due to the large size of the human genome and similarities between various kinases. PE offers a potential solution to this specificity problem, as it enables inhibition of modification of the target protein by ablation of the modification site instead of global enzyme inhibition. For example, removal of the lapidated peptide motif in KRAS would be a targeted approach that could be used in place of farnesyl transferase inhibition. This approach is the functional inverse of inhibiting a target protein activity by installing a lipid-targeting motif on a protein not designed to be membrane bound.

[1543] PE can also be used to instigate protein-protein complexation events. Proteins often function within complexes to execute their biological activity. PE can be used to either create or destroy the ability of proteins to exist within these complexes. To eliminate complex formation events, amino acid substitutions or insertions along the protein: protein interface could be installed to disfavor complexation. SSX18 is a protein component of the BAF complex, an important histone-remodeling complex. Mutations in SSX18 drive synovial sarcomas. PE could be used to install side chains that prevent SSX18 from binding to its protein partners in the complex to prevent its oncogenic activity. PE could also be used to remove the pathogenic mutations to restore WT activity of this protein. Alternatively, PE could be used to keep proteins within either their native complex or to drag them to participate in interactions that are unrelated to their native activity to inhibit their activity. Forming complexes that maintain one interaction state over another could represent an important therapeutic modality. Altering protein: protein interfaces to decrease the Kd of the interaction would keep those proteins stuck to one another longer. As protein complexes can have multiple signaling complexes, like n-myc driving neuroblastoma signaling cascades in disease but otherwise participating in healthy transcriptional control in other cells. PE could be used to install mutations that drive n-myc association with healthy interactions partners and decrease its affinity for oncogenic interaction partners.

### REFERENCES CITED IN EXAMPLE 14

[1544] Each of the following references are incorporated herein by reference.
[1545] 1. Selective Target Protein Degradation via Phthalimide Conjugation. Winter et al. Science. Author manuscript; available in PMC 2016 Jul. 8.
[1546] 2. Reversible disruption of mSWI/SNF (BAF) complexes by the SS18-SSX oncogenic fusion in synovial sarcoma. Kadoch and Crabtree. Cell. 2013 Mar. 28; 153(1):71-85. doi: 10.1016/j.cell.2013.02.036.
[1547] 3. Ribosomal frameshifting and transcriptional slippage: From genetic steganography and cryptography to adventitious use. Atkins et al. Nucleic Acids Research, Volume 44, Issue 15, 6 Sep. 2016, Pages 7007-7078.
[1548] 4. Transcriptional Regulation and its Misregulation in Disease. Lee and Young. Cell. Author manuscript; available in PMC 2014 Mar. 14.
[1549] 5. Protein localization in disease and therapy. Mien-Chie Hung, Wolfgang Link Journal of Cell Science 2011 124: 3381-3392.
[1550] 6. Loss of post-translational modification sites in disease. Li et al. Pac Symp Biocomput. 2010:337-47. PTMD: A Database of Human Disease-associated Post-translational Modifications. Xu et al. Genomics Proteomics Bioinformatics. 2018 August; 16(4):244-251. Epub 2018 Sep. 21.
[1551] 7. Post-transcriptional gene regulation by mRNA modifications. Zhao et al. Nature Reviews Molecular Cell Biology volume 18, pages 31-42 (2017).

### Example 15—Design and Engineering of Pegrnas

[1552] Described herein is a series of PEgRNA designs and strategies that can improve prime editing (PE) efficiency.

[1553] Prime editing (PE) is a genome editing technology that can replace, insert, or remove defined DNA sequences within a targeted genetic locus using information encoded within a prime editing guide RNA (PEgRNA). Prime editors (PEs) consist of a sequence-programmable DNA binding protein with nuclease activity (Cas9) fused to a reverse transcriptase (RT) enzyme. PEs form complexes with PEgRNAs, which contain the information for targeting specific DNA loci within their spacer sequences, as well as information specifying the desired edit in an engineered extension built into a standard sgRNA scaffold. PE:PEgRNA complexes bind and nick the programmed target DNA locus, allowing hybridization of the nicked DNA strand to the engineered primer binding sequence (PBS) of the PEgRNA. The reverse transcriptase domain then copies the edit-encoding information within the RT template portion of the PEgRNA, using the nicked genomic DNA as a primer for DNA polymerization. Subsequent DNA repair processes incorporate the newly synthesized edited DNA strand into the genomic locus. While the versatility of prime editing holds great promise as a research tool and potential therapeutic, several limitations in efficiency and scope exist due to the multi-step process required for editing. For example, unfavorable RNA structures that form within the PEgRNA can inhibit the copying of DNA edits from the PEgRNA to the genomic locus. One potential way to improve PE technology is through redesign and engineering of the critical PEgRNA component. Improvements to the design of these PEgRNAs are likely to be necessary for improved PE efficiency, as well as enable installation of longer inserted sequences into the genome.

[1554] Described herein is a series of PEgRNA designs that are envisioned to improve the efficacy of PE. These designs take advantage of a number of previously published approaches for improving sgRNA efficacy and/or stability, as well as utilize a number of novel strategies. These improvements can belong to one or more of a number of different categories:
[1555] (1) Longer PEgRNAs. This category relations to improved designes that enable efficient expression of functional PEgRNAs from non-polymerase III (pol III) promoters, which would enable the expression of longer PEgRNAs without burdensome sequence requirements;
[1556] (2) Core improvements. This category relates to improvements to the core, Cas9-binding PEgRNA scaffold, which could improve efficacy;
[1557] (3) RT processivity. This category relates to modifications to the PEgRNA that improve RT processivity, enabling the insertion of longer sequences at targeted genomic loci; and
[1558] (4) Termini motifs. This category relates to the addition of RNA motifs to the 5′ and/or 3′ termini of the PEgRNA that improve PEgRNA stability, enhance RT processivity, prevent mis-folding of the PEgRNA, or recruit additional factors important for genome editing.

[1559] Described herein are a number of potential such PEgRNA designs in each category. Several of these designs have been previously described for improving sgRNA activity with Cas9 and are indicated as such. Described herein is also a platform for the evolution of PEgRNAs for given sequence targets that would enable the polishing of the PEgRNA scaffold and enhance PE activity (5). Notably, these designs could also be readily applied to improve PEgRNAs recognized by any Cas9 or evolved variant thereof.

[1560] (1) Longer PEgRNAs.

[1561] sgRNAs are typically expressed from the U6 snRNA promoter. This promoter recruits pol III to express the associated RNA and is useful for expression of short RNAs that are retained within the nucleus. However, pol III is not highly processive and is unable to express RNAs longer than a few hundred nucleotides in length at the levels required for efficient genome editing¹⁸³. Additionally, pol III can stall or terminate at stretches of U's, potentially limiting the sequence diversity that could be inserted using a PEgRNA. Other promoters that recruit polymerase II (such as pCMV) or polymerase I (such as the U1 snRNA promoter) have been examined for their ability to express longer sgRNAs¹⁸³. However, these promoters are typically partially transcribed, which would result in extra sequence 5′ of the spacer in the expressed PEgRNA, which has been shown to result in markedly reduced Cas9:sgRNA activity in a site-dependent manner. Additionally, while pol III-transcribed PEgRNAs can simply terminate in a run of 6-7 U's, PEgRNAs transcribed from pol II or pol I would require a different termination signal. Often such signals also result in polyadenylation, which would result in undesired transport of the PEgRNA from the nucleus. Similarly, RNAs expressed from pol II promoters such as pCMV are typically 5′-capped, also resulting in their nuclear export.

[1562] Previously, Rinn and coworkers screened a variety of expression platforms for the production of long-noncoding RNA-(lncRNA) tagged sgRNAs¹⁸³. These platforms include RNAs expressed from pCMV and that terminate in the ENE element from the MALAT1 ncRNA from humans¹⁸⁴, the PAN ENE element from KSHV¹⁸⁵, or the 3′ box from U1 snRNA¹⁸⁶. Notably, the MALAT1 ncRNA and PAN ENEs form triple helices protecting the polyA-tail ^{184,187}. It is anticipated that, in addition to enabling expression of RNAs, these constructs could also enhance RNA stability (see section iv). Using the promoter from the U1 snRNA to enable expression of these longer sgRNAs¹⁸³ was also explored. It is anticipated that these expression systems will also enable the expression of longer PEgRNAs. In addition, a series of methods have been designed for the cleavage of the portion of the pol II promoter that would be transcribed as part of the PEgRNA, adding either a self-cleaving ribozyme such as the hammerhead¹⁸⁸, pistol¹⁸⁹, hatchet¹⁸⁹, hairpin¹⁹⁰, VS¹⁹¹, twister¹⁹², or twister sister¹⁹² ribozymes, or other self-cleaving elements to process the transcribed guide, or a hairpin that is recognized by Csy4¹⁹³ and also leads to processing of the guide. Also, it is hypothesized that incorporation of multiple ENE motifs could lead to improved PEgRNA expression and stability, as previously demonstrated for the KSHV PAN RNA and element¹⁸⁵. It is also anticipated that circularizing the PEgRNA in the form of a circular intronic RNA (ciRNA) could also lead to enhanced RNA expression and stability, as well as nuclear localization¹⁹⁴.

PEgRNA expression platform consisting of pCMV,
Csy4 hairping, the PEgRNA, and MALAT1 ENE
(SEQ ID NO: 757)
TAGTTATTAATAGTAATCAATTACGGGGTCATTAGTTCATAGCCCATAT
ATGGAGTTCCGCGTTACATAACTTACGGTAAATGGCCCGCCTGGCTGAC
CGCCCAACGACCCCCGCCCATTGACGTCAATAATGACGTATGTTCCCAT
AGTAACGCCAATAGGGACTTTCCATTGACGTCAATGGGTGGAGTATTTA
CGGTAAACTGCCCACTTGGCAGTACATCAAGTGTATCATATGCCAAGTA
CGCCCCCTATTGACGTCAATGACGGTAAATGGCCCGCCTGGCATTATGC
CCAGTACATGACCTTATGGGACTTTCCTACTTGGCAGTACATCTACGTA
TTAGTCATCGCTATTACCATGGTGATGCGGTTTTGGCAGTACATCAATG
GGCGTGGATAGCGGTTTGACTCACGGGGATTTCCAAGTCTCCACCCCAT
TGACGTCAATGGGAGTTTGTTTTGGCACCAAAATCAACGGGACTTTCCA
AAATGTCGTAACAACTCCGCCCCATTGACGCAAATGGGCGGTAGGCGTG
TACGGTGGGAGGTCTATATAAGCAGAGCTGGTTTAGTGAACCGTCAGAT
CGTTCACTGCCGTATAGGCAGGGCCCAGACTGAGCACGTGAGTTTTAGA
GCTAGAAATAGCAAGTTAAAATAAGGCTAGTCCGTTATCAACTTGAAAA
AGTGGGACCGAGTCGGTCCTCTGCCATCAAAGCGTGCTCAGTCTGTTTT
AGGGTCATGAAGGTTTTTCTTTTCCTGAGAAAACAACACGTATTGTTTT
CTCAGGTTTTGCTTTTTGGCCTTTTTCTAGCTTAAAAAAAAAAAAAGCA
AAAGATGCTGGTGGTTGGCACTCCTGGTTTCCAGGACGGGGTTCAAATC
CCTGCGGCGTCTTTGCTTTGACT
PEgRNA expression platform consisting of pCMV,
Csy4 hairping, the PEgRNA, and PAN ENE
(SEQ ID NO: 758)
TAGTTATTAATAGTAATCAATTACGGGGTCATTAGTTCATAGCCCATAT
ATGGAGTTCCGCGTTACATAACTTACGGTAAATGGCCCGCCTGGCTGAC
CGCCCAACGACCCCCGCCCATTGACGTCAATAATGACGTATGTTCCCAT
AGTAACGCCAATAGGGACTTTCCATTGACGTCAATGGGTGGAGTATTTA
CGGTAAACTGCCCACTTGGCAGTACATCAAGTGTATCATATGCCAAGTA
CGCCCCCTATTGACGTCAATGACGGTAAATGGCCCGCCTGGCATTATGC
CCAGTACATGACCTTATGGGACTTTCCTACTTGGCAGTACATCTACGTA
TTAGTCATCGCTATTACCATGGTGATGCGGTTTTGGCAGTACATCAATG
GGCGTGGATAGCGGTTTGACTCACGGGGATTTCCAAGTCTCCACCCCAT
TGACGTCAATGGGAGTTTGTTTTGGCACCAAAATCAACGGGACTTTCCA
AAATGTCGTAACAACTCCGCCCCATTGACGCAAATGGGCGGTAGGCGTG
TACGGTGGGAGGTCTATATAAGCAGAGCTGGTTTAGTGAACCGTCAGAT
CGTTCACTGCCGTATAGGCAGGGCCCAGACTGAGCACGTGAGTTTTAGA
GCTAGAAATAGCAAGTTAAAATAAGGCTAGTCCGTTATCAACTTGAAAA
AGTGGGACCGAGTCGGTCCTCTGCCATCAAAGCGTGCTCAGTCTGTTTT
GTTTTGGCTGGGTTTTTCCTTGTTCGCACCGGACACCTCCAGTGACCAG
ACGGCAAGGTTTTTATCCCAGTGTATATTGGAAAAACATGTTATACTTT
TGACAATTTAACGTGCCTAGAGCTCAAATTAAACTAATACCATAACGTA
ATGCAACTTACAACATAAATAAAGGTCAATGTTTAATCCATAAAAAAAA
AAAAAAAAAAA
PEgRNA expression platform consisting of pCMV,
Csy4 hairping, the PEgRNA, and 3xPAN ENE
(SEQ ID NO: 759)
TAGTTATTAATAGTAATCAATTACGGGGTCATTAGTTCATAGCCCATAT
ATGGAGTTCCGCGTTACATAACTTACGGTAAATGGCCCGCCTGGCTGAC
CGCCCAACGACCCCCGCCCATTGACGTCAATAATGACGTATGTTCCCAT
AGTAACGCCAATAGGGACTTTCCATTGACGTCAATGGGTGGAGTATTTA
CGGTAAACTGCCCACTTGGCAGTACATCAAGTGTATCATATGCCAAGTA
CGCCCCCTATTGACGTCAATGACGGTAAATGGCCCGCCTGGCATTATGC
CCAGTACATGACCTTATGGGACTTTCCTACTTGGCAGTACATCTACGTA
TTAGTCATCGCTATTACCATGGTGATGCGGTTTTGGCAGTACATCAATG
GGCGTGGATAGCGGTTTGACTCACGGGGATTTCCAAGTCTCCACCCCAT
TGACGTCAATGGGAGTTTGTTTTGGCACCAAAATCAACGGGACTTTCCA
AAATGTCGTAACAACTCCGCCCCATTGACGCAAATGGGCGGTAGGCGTG
TACGGTGGGAGGTCTATATAAGCAGAGCTGGTTTAGTGAACCGTCAGAT
CGTTCACTGCCGTATAGGCAGGGCCCAGACTGAGCACGTGAGTTTTAGA
GCTAGAAATAGCAAGTTAAAATAAGGCTAGTCCGTTATCAACTTGAAAA
AGTGGGACCGAGTCGGTCCTCTGCCATCAAAGCGTGCTCAGTCTGTTTT
GTTTTGGCTGGGTTTTTCCTTGTTCGCACCGGACACCTCCAGTGACCAG
ACGGCAAGGTTTTTATCCCAGTGTATATTGGAAAAACATGTTATACTTT
TGACAATTTAACGTGCCTAGAGCTCAAATTAAACTAATACCATAACGTA
ATGCAACTTACAACATAAATAAAGGTCAATGTTTAATCCATAAAAAAAA
AAAAAAAAAAAACACACTGTTTTGGCTGGGTTTTTCCTTGTTCGCACCG
GACACCTCCAGTGACCAGACGGCAAGGTTTTTATCCCAGTGTATATTGG
AAAAACATGTTATACTTTTGACAATTTAACGTGCCTAGAGCTCAAATTA
AACTAATACCATAACGTAATGCAACTTACAACATAAATAAAGGTCAATG
TTTAATCCATAAAAAAAAAAAAAAAAAAATCTCTCTGTTTTGGCTGGGT
TTTTCCTTGTTCGCACCGGACACCTCCAGTGACCAGACGGCAAGGTTTT
TATCCCAGTGTATATTGGAAAAACATGTTATACTTTTGACAATTTAACG
TGCCTAGAGCTCAAATTAAACTAATACCATAACGTAATGCAACTTACAA
CATAAATAAAGGTCAATGTTTAATCCATAAAAAAAAAAAAAAAAAAA
PEgRNA expression platform consisting of pCMV,
Csy4 hairping, the PEgRNA, and 3′ box
(SEQ ID NO: 760)
TAGTTATTAATAGTAATCAATTACGGGGTCATTAGTTCATAGCCCATAT
ATGGAGTTCCGCGTTACATAACTTACGGTAAATGGCCCGCCTGGCTGAC
CGCCCAACGACCCCCGCCCATTGACGTCAATAATGACGTATGTTCCCAT
AGTAACGCCAATAGGGACTTTCCATTGACGTCAATGGGTGGAGTATTTA
CGGTAAACTGCCCACTTGGCAGTACATCAAGTGTATCATATGCCAAGTA
CGCCCCCTATTGACGTCAATGACGGTAAATGGCCCGCCTGGCATTATGC
CCAGTACATGACCTTATGGGACTTTCCTACTTGGCAGTACATCTACGTA
TTAGTCATCGCTATTACCATGGTGATGCGGTTTTGGCAGTACATCAATG
GGCGTGGATAGCGGTTTGACTCACGGGGATTTCCAAGTCTCCACCCCAT
TGACGTCAATGGGAGTTTGTTTTGGCACCAAAATCAACGGGACTTTCCA
AAATGTCGTAACAACTCCGCCCCATTGACGCAAATGGGCGGTAGGCGTG
TACGGTGGGAGGTCTATATAAGCAGAGCTGGTTTAGTGAACCGTCAGAT
CGTTCACTGCCGTATAGGCAGGGCCCAGACTGAGCACGTGAGTTTTAGA
GCTAGAAATAGCAAGTTAAAATAAGGCTAGTCCGTTATCAACTTGAAAA
AGTGGGACCGAGTCGGTCCTCTGCCATCAAAGCGTGCTCAGTCTGTTTG
TTTCAAAAGTAGACTGTACGCTAAGGGTCATATCTTTTTTTGTTTGGTT
TGTGTCTTGGTTGGCGTCTTAAA
PEgRNA expression platform consisting of pU1,
Csy4 hairping, the PEgRNA, and 3′ box
(SEQ ID NO: 761)
CTAAGGACCAGCTTCTTTGGGAGAGAACAGACGCAGGGGCGGGAGGGAA
AAAGGGAGAGGCAGACGTCACTTCCCCTTGGCGGCTCTGGCAGCAGATT
GGTCGGTTGAGTGGCAGAAAGGCAGACGGGGACTGGGCAAGGCACTGTC
GGTGACATCACGGACAGGGCGACTTCTATGTAGATGAGGCAGCGCAGAG
GCTGCTGCTTCGCCACTTGCTGCTTCACCACGAAGGAGTTCCCGTGCCC
TGGGAGCGGGTTCAGGACCGCTGATCGGAAGTGAGAATCCCAGCTGTGT
GTCAGGGCTGGAAAGGGCTCGGGAGTGCGCGGGGCAAGTGACCGTGTGT
GTAAAGAGTGAGGCGTATGAGGCTGTGTCGGGGCAGAGGCCCAAGATCT
CAGTTCACTGCCGTATAGGCAGGGCCCAGACTGAGCACGTGAGTTTTAG
AGCTAGAAATAGCAAGTTAAAATAAGGCTAGTCCGTTATCAACTTGAAA
AAGTGGGACCGAGTCGGTCCTCTGCCATCAAAGCGTGCTCAGTCTGTTT
CAGCAAGTTCAGAGAAATCTGAACTTGCTGGATTTTTGGAGCAGGGAGA
TGGAATAGGAGCTTGCTCCGTCCACTCCACGCATCGACCTGGTATTGCA
GTACCTCCAGGAACGGTGCACCCACTTTCTGGAGTTTCAAAAGTAGACT
GTACGCTAAGGGTCATATCTTTTTTTGTTTGGTTTGTGTCTTGGTTGGC
GTCTTAAA

[1563] (2) Core Improvements.

[1564] The core, Cas9-binding PEgRNA scaffold can likely be improved to enhance PE activity. Several such approaches have already been demonstrated. For instance, the first pairing element of the scaffold (P1) contains a GTTTT-AAAAC (SEQ ID NO: 3939) pairing element. Such runs of Ts have been shown to result in pol III pausing and premature termination of the RNA transcript. Rational mutation of one of the T-A pairs to a G-C pair in this portion of P1 has been shown to enhance sgRNA activity, suggesting this approach would also be feasible for PEgRNAs¹⁹⁵. Additionally, increasing the length of P1 has also been shown to enhance sgRNA folding and lead to improved activity¹⁹⁵, suggesting it as another avenue for the improvement of PEgRNA activity. Finally, it is likely the polishing of the PEgRNA scaffold through directed evolution of PEgRNAs on a given DNA target would also result in improved activity. This is described in section (v).

PEgRNA containing a 6 nt extension to P1
(SEQ ID NO: 228)
GGCCCAGACTGAGCACGTGAGTTTTAGAGCTAGCTCATGAAAATGAGCT
AGCAAGTTAAAATAAGGCTAGTCCGTTATCAACTTGAAAAAGTGGGACC
GAGTCGGTCCTCTGCCATCAAAGCGTGCTCAGTCTGTTTTTTT
PEgRNA containing a T-A to G-C mutation within P1
(SEQ ID NO: 229)
GGCCCAGACTGAGCACGTGAGTTTGAGAGCTAGAAATAGCAAGTTTAAA
TAAGGCTAGTCCGTTATCAACTTGAAAAAGTGGGACCGAGTCGGTCCTC
TGCCATCAAAGCGTGCTCAGTCTGTTTTTTT

[1565] (iii) Improvement of RT processivity via modifications to the template region of the PEgRNA

[1566] As the size of the insertion templated by the PEgRNA increases, it is more likely to be degraded by endonucleases, undergo spontaneous hydrolysis, or fold into secondary structures unable to be reverse-transcribed by the RT or that disrupt folding of the PEgRNA scaffold and subsequent Cas9-RT binding. Accordingly, it is likely that modification to the template of the PEgRNA might be necessary to affect large insertions, such as the insertion of whole genes. Some strategies to do so include the incorporation of modified nucleotides within a synthetic or semi-synthetic PEgRNA that render the RNA more resistant to degradation or hydrolysis or less likely to adopt inhibitory secondary structures¹⁹⁶. Such modifications could include 8-aza-7-deazaguanosine, which would reduce RNA secondary structure in G-rich sequences; locked-nucleic acids (LNA) that reduce degradation and enhance certain kinds of RNA secondary structure; 2′-O-methyl, 2′-fluoro, or 2′-O-methoxyethoxy modifications that enhance RNA stability. Such modifications could also be included elsewhere in the PEgRNA to enhance stability and activity. Alternatively or additionally, the template of the PEgRNA could be designed such that it both encodes for a desired protein product and is also more likely to adopt simple secondary structures that are able to be unfolded by the RT. Such simple structures would act as a thermodynamic sink, making it less likely that more complicated structures that would prevent reverse transcription would occur. Finally, one could also imagine splitting the template into two, separate PEgRNAs. In such a design, a PE would be used to initiate transcription and also recruit a separate template RNA to the targeted site via an RNA-binding protein fused to Cas9 or an RNA recognition element on the PEgRNA itself such as the MS2 aptamer. The RT could either directly bind to this separate template RNA, or initiate reverse transcription on the original PEgRNA before swapping to the second template. Such an approach could enable long insertions by both preventing mis-folding of the PEgRNA upon addition of the long template and also by not requiring dissociation of Cas9 from the genome for long insertions to occur, which could possibly be inhibiting PE-based long insertions.

[1567] (iv) Installation of additional RNA motifs at the 5′ or 3′ termini

[1568] PEgRNA designs could also be improved via the installation of additional motifs at either end of the terminus of the RNA. Several such motifs—such as the PAN ENE from KSHV and the ENE from MALAT1 were discussed earlier in part(i)^{184,185} as possible means to terminate expression of longer PEgRNAs from non-pol III promoters. These elements form RNA triple helices that engulf the polyA tail, resulting in their being retained within the nucleus^{184,187.} However, by forming complex structures at the 3′ terminus of the PEgRNA that occlude the terminal nucleotide, these structures would also likely help prevent exonuclease-mediated degradation of PEgRNAs. Other structural elements inserted at the 3′ terminus could also enhance RNA stability, albeit without enabling termination from non-pol III promoters. Such motifs could include hairpins or RNA quadruplexes that would occlude the 3′ terminus¹⁹⁷, or self-cleaving ribozymes such as HDV that would result in the formation of a 2′-3′-cyclic phosphate at the 3′ terminus and also potentially render the PEgRNA less likely to be degraded by exonucleases¹⁹⁸. Inducing the PEgRNA to cyclize via incomplete splicing—to form a ciRNA—could also increase PEgRNA stability and result in the PEgRNA being retained within the nucleus¹⁹⁴.

[1569] Additional RNA motifs could also improve RT processivity or enhance PEgRNA activity by enhancing RT binding to the DNA-RNA duplex. Addition of the native sequence bound by the RT in its cognate retroviral genome could enhance RT activity¹⁹⁹. This could include the native primer binding site (PBS), polypurine tract (PPT), or kissing loops involved in retroviral genome dimerization and initiation of transcription¹⁹⁹. Addition of dimerization motifs—such as kissing loops or a GNRA tetraloop/tetraloop receptor pair²⁰⁰—at the 5′ and 3′ termini of the PEgRNA could also result in effective circularization of the PEgRNA, improving stability. Additionally, it is envisioned that addition of these motifs could enable the physical separation of the PEgRNA spacer and primer, prevention occlusion of the spacer which would hinder PE activity. Short 5′ extensions to the PEgRNA that form a small toehold hairpin in the spacer region could also compete favorably against the annealing region of the PEgRNA binding the spacer. Finally, kissing loops could also be used to recruit other template RNAs to the genomic site and enable swapping of RT activity from one RNA to the other (section iii).

PEgRNA-HDV fusion
(SEQ ID NO: 230)
GGCCCAGACTGAGCACGTGAGTTTTAGAGCTAGAAATAGCAAGTTAAAA
TAAGGCTAGTCCGTTATCAACTTGAAAAAGTGGGACCGAGTCGGTCCTC
TGCCATCAAAGCGTGCTCAGTCTGGGCCGGCATGGTCCCAGCCTCCTCG
CTGGCGCCGGCTGGGCAACATGCTTCGGCATGGCGAATGGGACTTTTTT
T
PEgRNA-MMLV kissing loop
(SEQ ID NO: 231)
GGTGGGAGACGTCCCACCGGCCCAGACTGAGCACGTGAGTTTTAGAGCT
AGAAATAGCAAGTTAAAATAAGGCTAGTCCGTTATCAACTTGAAAAAGT
GGGACCGAGTCGGTCCTCTGCCATCAAAGCTTCGACCGTGCTCAGTCTG
GTGGGAGACGTCCCACCTTTTTTT
PEgRNA-VS ribozyme kissing loop
(SEQ ID NO: 232)
GAGCAGCATGGCGTCGCTGCTCACGGCCCAGACTGAGCACGTGAGTTTT
AGAGCTAGAAATAGCAAGTTAAAATAAGGCTAGTCCGTTATCAACTTGA
AAAAGTGGGACCGAGTCGGTCCTCTGCCATCAAAGCTTCGACCGTGCTC
AGTCTCCATCAGTTGACACCCTGAGGTTTTTTT
PEgRNA-GNRA tetraloop/tetraloop receptor
(SEQ ID NO: 233)
GCAGACCTAAGTGGUGACATATGGTCTGGGCCCAGACTGAGCACGTGAG
TTTTAGAGCTAUACGTAGCAAGTTAAAATAAGGCTAGTCCGTTATCAAC
TTUACGAAGTGGGACCGAGTCGGTCCTCTGCCATCAAAGCTTCGACCGT
GCTCAGTCTGCATGCGATTAGAAATAATCGCATGTTTTTTT
PEgRNA template switching secondary RNA-HDV
fusion
(SEQ ID NO: 234)
TCTGCCATCAAAGCTGCGACCGTGCTCAGTCTGGTGGGAGACGTCCCAC
CGGCCGGCATGGTCCCAGCCTCCTCGCTGGCGCCGGCTGGGCAACATGC
TTCGGCATGGCGAATGGGACTTTTTTT

[1570] (v) Evolution of PEgRNAs

[1571] It is likely that the PEgRNA scaffold can be further improved via directed evolution, in an analogous fashion to how SpCas9 and base editors have been improved²⁰¹. Directed evolution could enhance PEgRNA recognition by Cas9 or evolved Cas9 variants. Additionally, it is likely that different PEgRNA scaffold sequences would be optimal at different genomic loci, either enhancing PE activity at the site in question, reducing off-target activities, or both. Finally, evolution of PEgRNA scaffolds to which other RNA motifs have been added would almost certainly improve the activity of the fused PEgRNA relative to the unevolved, fusion RNA. For instance, evolution of allosteric ribozymes composed of c-di-GMP-I aptamers and hammerhead ribozymes led to dramatically improved activity²⁰², suggesting that evolution would improve the activity of hammerhead-PEgRNA fusions as well. In addition, while Cas9 currently does not generally tolerate 5′ extension of the sgRNA, directed evolution will likely generate enabling mutations that mitigate this intolerance, allowing additional RNA motifs to be utilized.

[1572] As described herein, a number of these approaches have already been described for use with Cas9:sgRNA complexes, but no designs for improving PEgRNA activity have been reported. Other strategies for the installation of programmable mutations into the genome include base-editing, homology-directed recombination (HDR), precise microhomology-mediated end-joining (MMEJ), or transposase-mediated editing. However, all of these approaches have significant drawbacks when compared to PEs. Current base editors, while more efficient than existing PEs, can only install certain classes of genomic mutations and can result in additional, undesired nucleotide conversions at the site of interest. HDR is only feasible in a very small minority of cell types and results in comparably high rates of random insertion and deletion mutations (indels). Precise MMEJ can lead to predictable repair of double-strand breaks, but is largely limited to installation of deletions, is very site-dependent, and can also have comparably high rates of undesired indels. Transposase-mediated editing has to date only been shown to function in bacteria. As such improvements to PE represent possibly the best path forward for the therapeutic correction of a wide-swatch of genomic mutations.

### REFERENCES CITED IN EXAMPLE 15

[1573] Each of the following references are cited in Example 15, each of which are incorporated herein by reference.
[1574] 1. Schechner, DM, Hacisuleyman E., Younger S T, Rinn J L. Nat Methods 664-70 (2015).
[1575] 2. Brown J A, et al. Nat Struct Mol Biol 633-40 (2014).
[1576] 3. Conrad N A and Steitz J A. EMBO J 1831-41 (2005).
[1577] 4. Bartlett J S, et al. Proc Natl Acad Sci USA 8852-7 (1996).
[1578] 5. Mitton-Fry R M, DeGregorio S J, Wang J, Steitz T A, Steitz J A. Science 1244-7 (2010).
[1579] 6. Forster A C, Symons R H. Cell. 1987.
[1580] 7. Weinberg Z, Kim P B, Chen T H, Li S, Harris K A, Lünse CE, Breaker R R. Nat. Chem. Biol. 2015.
[1581] 8. Feldstein P A, Buzayan J M, Bruening G. Gene 1989.
[1582] 9. Saville B J, Collins R A. Cell. 1990.
[1583] 10. Roth A, Weinberg Z, Chen A G, Kim P G, Ames T D, Breaker R R. Nat Chem Biol. 2013.
[1584] 11. Borchardt E K, et al. RNA 1921-30 (2015).
[1585] 12. Zhang Y, et al. Mol Cell 792-806 (2013).
[1586] 13. Dang Y, et al. Genome Biol 280 (2015).
[1587] 14. Schaefer M, Kapoor U, and Jantsch M F. Open Biol 170077 (2017).
[1588] 15. Nahar S, et al. Chem Comm 2377-80 (2018).
[1589] 16. Gao Y and Zhao Y. J Integr Plant Biol 343-9 (2014).
[1590] 17. Dubois N, Marquet R, Paillart J, Bernacchi S. Front Microbiol 527 (2018).
[1591] 18. Costa M and Michel F. EMBO J 1276-85 (1995).
[1592] 19. Hu J H, et al. Nature 57-63 (2018).
[1593] 20. Furukawa K, Gu H, Breaker R R. Methods Mol Biol 209-20 (2014).

### Example 16—Expanding the Targeting Scope of Pe Using DNA Binding Proteins Other than Spcas9

[1594] Prime editing (PE) using Streptococcus pyogenes Cas9 (SpCas9) can efficiently install all single base substitutions, insertions, deletions, and combinations thereof at genomic loci where there is a suitably-placed NGG protospacer adjacent motif (PAM) that SpCas9 can efficiently bind. The methods described herein broaden the targeting capability of PE by expanding the accessible PAMs and, therefore, the targetable genomic loci accessible for efficient PE. Prime editors using RNA-guided DNA binding proteins other than SpCas9 enable an expanded targettable scope of genomic loci by allowing access to different PAMs. In addition, use of RNA-guided DNA binding proteins smaller than SpCas9 also allows for more efficient viral delivery. PE with Cas proteins or other RNA-guided DNA binding proteins beyond SpCas9 will allow for high efficiency therapeutic edits that were either inaccessible or inefficient using SpCas9-based PE.

[1595] This is expected to be used in situations where SpCas9-based PE is either inefficient due to non-ideal spacing of an edit to relative to an NGG PAM or the overall size of the SpCas9-based construct is prohibitive for cellular expression and/or delivery. Specific disease-relevent loci such as the Huntingtin gene, which has few and poorly located NGG PAMs for SpCas9 near the target region, can easily be targeted using different Cas proteins in the PE system such as SpCas9-VRQR which recognizes an NGA PAM. Smaller Cas proteins will be used to generate smaller PE constructs that can be packaged into AAV vectors more efficiently, enabling better delivery to target tissues. FIG. 61 shows the reduction to practice of prime editing using Staphylococcus aureus CRISPR-Cas as the RNA-guided DNA binding protein. NT is untreated control.

[1596] FIGS. 62A-62B provide a demonstration of the importance of the protospacer for efficient installation of a desired edit at a precise location with prime editing. This highlights the importance of alternate PAMs and protospacers as novel features of this technology. “n.d.” in FIG. 62A is “not detected.”

[1597] FIG. 63 shows the reduction to practice of PE using SpCas9(H840A)-VRQR and SpCas9(H840A)-VRER as the RNA-guided DNA binding protein in a prime editor system. The SpCas9(H840A)-VRQR napDNAbp is disclosed herein as SEQ ID NO: 87. The SpCas9(H840A)-VRER napDNAbp is disclosed herein as SEQ ID NO: 88. The SpCas9(H840A)-VRER-MMLV RT fusion protein is disclosed herein as SEQ ID NO: 516, wherein the MMLV RT comprises the D200N, L603W, T330P, T306K, and W313F substitutions relative to the wild type MMLV RT. The SpCas9(H840A)-VRQR-MMLV RT fusion protein is disclosed herein as SEQ ID NO: 515, wherein the MMLV RT comprises the D200N, L603W, T330P, T306K, and W313F substitutions relative to the wild type MMLV RT. Seven different loci in the human genome are targeted: 4 with the SpCas9(H840A)-VRQR-MMLV RT prime editor system and 3 with the SpCas9(H840A)-VRER-MMLV RT system. The amino acid sequences of the tested constructs are as follows:

SACAS9-M-MLV RT PRIME EDITOR
(SEQ ID NO: 660)
MKRTADGSEFESPKKKRKVGKRNYILGLDIGITSVGYGIIDYETR
DVIDAGVRLFKEANVENNEGRRSKRGARRLKRRRRHRIQRVKK
LLFDYNLLTDHSELSGINPYEARVKGLSQKLSEEEFSAALLHLA
KRRGVHNVNEVEEDTGNELSTKEQISRNSKALEEKYVAELQLE
RLKKDGEVRGSINRFKTSDYVKEAKQLLKVQKAYHQLDQSFID
TYIDLLETRRTYYEGPGEGSPFGWKDIKEWYEMLMGHCTYFPE
ELRSVKYAYNADLYNALNDLNNLVITRDENEKLEYYEKFQIIEN
VFKQKKKPTLKQIAKEILVNEEDIKGYRVTSTGKPEFTNLKVYH
DIKDITARKEIIENAELLDQIAKILTIYQSSEDIQEELTNLNSELTQE
EIEQISNLKGYTGTHNLSLKAINLILDELWHTNDNQIAIFNRLKL
VPKKVDLSQQKEIPTTLVDDFILSPVVKRSFIQSIKVINAIIKKYG
LPNDIIIELAREKNSKDAQKMINEMQKRNRQTNERIEEIIRTTGK
ENAKYLIEKIKLHDMQEGKCLYSLEAIPLEDLLNNPFNYEVDHII
PRSVSFDNSFNNKVLVKQEEASKKGNRTPFQYLSSSDSKISYETF
KKHILNLAKGKGRISKTKKEYLLEERDINRFSVQKDFINRNLVD
TRYATRGLMNLLRSYFRVNNLDVKVKSINGGFTSFLRRKWKFK
KERNKGYKHHAEDALIIANADFIFKEWKKLDKAKKVMENQMF
EEKQAESMPEIETEQEYKEIFITPHQIKHIKDFKDYKYSHRVDKK
PNRELINDTLYSTRKDDKGNTLIVNNLNGLYDKDNDKLKKLIN
KSPEKLLMYHHDPQTYQKLKLIMEQYGDEKNPLYKYYEETGN
YLTKYSKKDNGPVIKKIKYYGNKLNAHLDITDDYPNSRNKVVK
LSLKPYRFDVYLDNGVYKFVTVKNLDVIKKENYYEVNSKCYE
EAKKLKKISNQAEFIASFYNNDLIKINGELYRVIGVNNDLLNRIE
VNMIDITYREYLENMNDKRPPRIIKTIASKTQSIKKYSTDILGNL
YEVKSKKHPQIIKKGSGGSSGGSSGSETPGTSESATPESSGGSSG
GSSTLNIEDEYRLHETSKEPDVSLGSTWLSDFPQAWAETGGMGL
AVRQAPLIIPLKATSTPVSIKQYPMSQEARLGIKPHIQRLLDQGIL
VPCQSPWNTPLLPVKKPGTNDYRPVQDLREVNKRVEDIHPTVP
NPYNLLSGLPPSHQWYTVLDLKDAFFCLRLHPTSQPLFAFEWR
DPEMGISGQLTWTRLPQGFKNSPTLFDEALHRDLADFRIQHPDL
ILLQYVDDLLLAATSELDCQQGTRALLQTLGNLGYRASAKKAQ
ICQKQVKYLGYLLKEGQRWLTEARKETVMGQPTPKTPRQLREF
LGTAGFCRLWIPGFAEMAAPLYPLTKTGTLFNWGPDQQKAYQEI
KQALLTAPALGLPDLTKPFELFVDEKQGYAKGVLTQKLGPWRR
PVAYLSKKLDPVAAGWPPCLRMVAAIAVLTKDAGKLTMGQPLVI
LAPHAVEALVKQPPDRWLSNARMTHYQALLLDTDRVQFGPVV
ALNPATLLPLPEEGLQHNCLDILAEAHGTRPDLTDQPLPDADHT
WYTDGSSLLQEGQRKAGAAVTTETEVIWAKALPAGTSAQRAEL
IALTQALKMAEGKKLNVYTDSRYAFATAHIHGEIYRRRGLLTSE
GKEIKNKDEILALLKALFLPKRLSIIHCPGHQKGHSAEARGNRM
ADQAARKAAITETPDTSTLLIENSSPSGGSKRTADGSEFEPKKKR
KV
SPCAS9(H840A)-VRQR-MALONEY MURINE LEUKEMIA VIRUS
REVERSE TRANSCRIPTASE PRIME EDITOR
(SEQ ID NO: 661)
MKRTADGSEFESPKKKRKVDKKYSIGLDIGTNSVGWAVITDEY
KVPSKKFKVLGNTDRHSIKKNLIGALLFDSGETAEATRLKRTAR
RRYTRRKNRICYLQEIFSNEMAKVDDSFFHRLEESFLVEEDKKH
ERHPIFGNIVDEVAYHEKYPTIYHLRKKLVDSTDKADLRLIYLAL
AHMIKFRGHFLIEGDLNPDNSDVDKLFIQLVQTYNQLFEENPIN
ASGVDAKAILSARLSKSRRLENLIAQLPGEKKNGLFGNLIALSL
GLTPNFKSNFDLAEDAKLQLSKDTYDDDLDNLLAQIGDQYADL
FLAAKNLSDAILLSDILRVNTEITKAPLSASMIKRYDEHHQDLTL
LKALVRQQLPEKYKEIFFDQSKNGYAGYIDGGASQEEFYKFIKPI
LEKMDGTEELLVKLNREDLLRKQRTFDNGSIPHQIHLGELHAIL
RRQEDFYPFLKDNREKIEKILTFRIPYYVGPLARGNSRFAWMTR
KSEETITPWNFEEVVDKGASAQSFIERMTNFDKNLPNEKVLPKH
SLLYEYFTVYNELTKVKYVTEGMRKPAFLSGEQKKAIVDLLFKT
NRKVTVKQLKEDYFKKIECFDSVEISGVEDRFNASLGTYHDLL
KIIKDKDFLDNEENEDILEDIVLTLTLFEDREMIEERLKTYAHLFD
DKVMKQLKRRRYTGWGRLSRKLINGIRDKQSGKTILDFLKSDG
FANRNFMQLIHDDSLTFKEDIQKAQVSGQGDSLHEHIANLAGSP
AIKKGILQTVKVVDELVKVMGRHKPENIVIEMARENQTTQKGQ
KNSRERMKRIEEGIKELGSQILKEHPVENTQLQNEKLYLYYLQN
GRDMYVDQELDINRLSDYDVDAIVPQSFLKDDSIDNKVLTRSD
KNRGKSDNVPSEEVVKKMKNYWRQLLNAKLITQRKFDNLTKA
ERGGLSELDKAGFIKRQLVETRQITKHVAQILDSRMNTKYDEND
KLIREVKVITLKSKLVSDFRKDFQFYKVREINNYHHAHDAYLNA
VVGTALIKKYPKLESEFVYGDYKVYDVRKMIAKSEQEIGKATA
KYFFYSNIMNFFKTEITLANGEIRKRPLIETNGETGEIVWDKGRD
FATVRKVLSMPQVNIVKKTEVQTGGFSKESILPKRNSDKLIARK
KDWDPKKYGGFVSPTVAYSVLVVAKVEKGKSKKLKSVKELLGI
TIEVIERSSFEKNPIDFLEAKGYKEVKKDLIIKLPKYSLFELENGRK
RMLASARELQKGNELALPSKYVNFLYLASHYEKLKGSPEDNEQ
KQLFVEQHKHYLDEIIEQISEFSKRVILADANLDKVLSAYNKHR
DKPIREQAENIIHLFTLTNLGAPAAFKYFDTTIDRKQYRSTKEVL
DATLIHQSITGLYETRIDLSQLGGDSGGSSGGSSGSETPGTSESAT
PESSGGSSGGSSTLNIEDEYRLHETSKEPDVSLGSTWLSDFPQA
WAETGGMGLAVRQAPLIIPLKATSTPVSIKQYPMSQEARLGIKP
HIQRLLDQGILVPCQSPWNTPLLPVKKPGTNDYRPVQDLREVN
KRVEDIHPTVPNPYNLLSGLPPSHQWYTVLDLKDAFFCLRLHPT
SQPLFAFEWRDPEMGISGQLTWTRLPQGFKNSPTLFNEALHRDL
ADFRIQHPDLILLQYVDDLLLAATSELDCQQGTRALLQTLGNLG
YRASAKKAQICQKQVKYLGYLLKEGQRWLTEARKETVMGQPT
PKTPRQLREFLGKAGFCRLFIPGFAEMAAPLYPLTKPGTLFNWG
PDQQKAYQEIKQALLTAPALGLPDLTKPFELFVDEKQGYAKGVL
TQKLGPWRRPVAYLSKKLDPVAAGWPPCLRMVAAIAVLTKDAG
KLTMGQPLVILAPHAVEALVKQPPDRWLSNARMTHYQALLLDT
DRVQFGPVVALNPATLLPLPEEGLQHNCLDILAEAHGTRPDLTD
QPLPDADHTWYTDGSSLLQEGQRKAGAAVTTETEVIWAKALPA
GTSAQRAELIALTQALKMAEGKKLNVYTDSRYAFATAHIHGEIY
RRRGWLTSEGKEIKNKDEILALLKALFLPKRLSIIHCPGHQKGHS
AEARGNRMADQAARKAAITETPDTSTLLIENSSPSGGSKRTADG
SEFEPKKKRKV
SPCAS9(H840A)-VRER-MALONEY MURINE LEUKEMIA VIRUS
REVERSE TRANSCRIPTASE PRIME EDITOR
(SEQ ID NO: 662)
MKRTADGSEFESPKKKRKVDKKYSIGLDIGTNSVGWAVITDEY
KVPSKKFKVLGNTDRHSIKKNLIGALLFDSGETAEATRLKRTAR
RRYTRRKNRICYLQEIFSNEMAKVDDSFFHRLEESFLVEEDKKH
ERHPIFGNIVDEVAYHEKYPTIYHLRKKLVDSTDKADLRLIYLAL
AHMIKFRGHFLIEGDLNPDNSDVDKLFIQLVQTYNQLFEENPIN
ASGVDAKAILSARLSKSRRLENLIAQLPGEKKNGLFGNLIALSL
GLTPNFKSNFDLAEDAKLQLSKDTYDDDLDNLLAQIGDQYADL
FLAAKNLSDAILLSDILRVNTEITKAPLSASMIKRYDEHHQDLTL
LKALVRQQLPEKYKEIFFDQSKNGYAGYIDGGASQEEFYKFIKPI
LEKMDGTEELLVKLNREDLLRKQRTFDNGSIPHQIHLGELHAIL
RRQEDFYPFLKDNREKIEKILTFRIPYYVGPLARGNSRFAWMTR
KSEETITPWNFEEVVDKGASAQSFIERMTNFDKNLPNEKVLPKH
SLLYEYFTVYNELTKVKYVTEGMRKPAFLSGEQKKAIVDLLFKT
NRKVTVKQLKEDYFKKIECFDSVEISGVEDRFNASLGTYHDLL
KIIKDKDFLDNEENEDILEDIVLTLTLFEDREMIEERLKTYAHLFD
DKVMKQLKRRRYTGWGRLSRKLINGIRDKQSGKTILDFLKSDG
FANRNFMQLIHDDSLTFKEDIQKAQVSGQGDSLHEHIANLAGSP
AIKKGILQTVKVVDELVKVMGRHKPENIVIEMARENQTTQKGQ
KNSRERMKRIEEGIKELGSQILKEHPVENTQLQNEKLYLYYLQN
GRDMYVDQELDINRLSDYDVDAIVPQSFLKDDSIDNKVLTRSD
KNRGKSDNVPSEEVVKKMKNYWRQLLNAKLITQRKFDNLTKA
ERGGLSELDKAGFIKRQLVETRQITKHVAQILDSRMNTKYDEND
KLIREVKVITLKSKLVSDFRKDFQFYKVREINNYHHAHDAYLNA
VVGTALIKKYPKLESEFVYGDYKVYDVRKMIAKSEQEIGKATA
KYFFYSNIMNFFKTEITLANGEIRKRPLIETNGETGEIVWDKGRD
FATVRKVLSMPQVNIVKKTEVQTGGFSKESILPKRNSDKLIARK
KDWDPKKYGGFVSPTVAYSVLVVAKVEKGKSKKLKSVKELLGI
THVIERSSFEKNPIDFLEAKGYKEVKKDLIIKLPKYSLFELENGRK
RMLASARELQKGNELALPSKYVNFLYLASHYEKLKGSPEDNEQ
KQLFVEQHKHYLDEIIEQISEFSKRVILADANLDKVLSAYNKHR
DKPIREQAENIIHLFTLTNLGAPAAFKYFDTTIDRKEYRSTKEVL
DATLIHQSITGLYETRIDLSQLGGDSGGSSGGSSGSETPGTSESAT
PESSGGSSGGSSTLNIEDEYRLHETSKEPDVSLGSTWLSDFPQA
WAETGGMGLAVRQAPLIIPLKATSTPVSIKQYPMSQEARLGIKP
HIQRLLDQGILVPCQSPWNTPLLPVKKPGTNDYRPVQDLREVN
KRVEDIHPTVPNPYNLLSGLPPSHQWYTVLDLKDAFFCLRLHPT
SQPLFAFEWRDPEMGISGQLTWTRLPQGFKNSPTLFNEALHRDL
ADFRIQHPDLILLQYVDDLLLAATSELDCQQGTRALLQTLGNLG
YRASAKKAQICQKQVKYLGYLLKEGQRWLTEARKETVMGQPT
PKTPRQLREFLGKAGFCRLFIPGFAEMAAPLYPLTKPGTLFNWG
PDQQKAYQEIKQALLTAPALGLPDLTKPFELFVDEKQGYAKGVL
TQKLGPWRRPVAYLSKKLDPVAAGWPPCLRMVAAIAVLTKDAG
KLTMGQPLVILAPHAVEALVKQPPDRWLSNARMTHYQALLLDT
DRVQFGPVVALNPATLLPLPEEGLQHNCLDILAEAHGTRPDLTD
QPLPDADHTWYTDGSSLLQEGQRKAGAAVTTETEVIWAKALPA
GTSAQRAELIALTQALKMAEGKKLNVYTDSRYAFATAHIHGEIY
RRRGWLTSEGKEIKNKDEILALLKALFLPKRLSIIHCPGHQKGHS
AEARGNRMADQAARKAAITETPDTSTLLIENSSPSGGSKRTADG
SEFEPKKKRKV

[1598] As shown in FIG. 63, the SpCas9(H840A)-VRQR-MMLV RT was operational at PAM sites that included “AGAG” and “GGAG”, with some editing activity at “GGAT” and “AGAT” PAM sequences. The SpCas9(H840A)-VRER-MMLV RT was operational at PAM sites that included “AGCG” and “GGCG”, with some editing activity at “TGCG.”

[1599] The data demonstrates that prime editing may be conducted using napDNAbps which bear different PAM specificities, such as those Cas9 variant described herein.

### Example 17—Introduction of Recombinase Target Sites with Pe

[1600] This Example describes a method to address genetic disease or generate tailor-made animal or plant models by using prime editing (PE) to introduce recombinase targets sites (SSR target sites) in mammalian and other genomes with high specificity and efficiency.

[1601] This Example describes use of PE to introduce recombinase recognition sequences at high-value loci in human or other genomes, which, after exposure to site-specific recombinase(s), will direct precise and efficient genomic modifications (FIG. 64). In various embodiments show in FIG. 64, PE may be used to (b) insert a single SSR target for use as a site for genomic integration of a DNA donor template. (c) shows how a tandem insertion of SSR target sites can be used to delete a portion of the genome. (d) shows how a tandem insertion of SSR target sites can be used to invert a portion of the genome. (e) shows how the insertion of two SSR target sites at two distal chromosomal regions can result in chromosomal translocation. (f) shows how the insertion of two different SSR target sites in the genome can be used to exchange a cassette from a DNA donor template. Each of the types of genome modifications are envisioned by using PE to insert SSR targets, but this list also is not meant to be limiting.

[1602] Many large-scale genomic changes, such as gene insertions, deletions, inversions, or chromosomal translocations, are implicated in genetic disease₁₋₇. In addition, custom and targeted manipulation of eukaryotic genomes is important for research into human disease, as well as generation of transgenic plants^{8,9} or other biotechnological products. For example, microdeletions of chromosomes can lead to disease, and replacement of these deletions by insertions of critical DNA elements could lead to a permanent amelioration of disease. In addition, diseases resulting from inversions, gene copy number changes, or chromosomal translocations could be addressed by restoring the previous gene structure in affected cells. Alternatively, in plants or other high value eukaryotic organisms used in industry, introduction of recombinant DNA or targeted genomic rearrangements could lead to improved products, for example crops which require fewer resources or are resistant to pathogens. Current technologies for effecting large-scale genomic changes rely on random or stochastic processes, for example the use of transposons or retroviruses, while other desired genomic modifications have only been achieved by homologous recombination strategies.

[1603] One appealing class of proteins for accomplishing targeted and efficient genomic modification is site-specific recombinases (SSRs). SSRs have a long history of being used as a tool for genomic modification¹⁰⁻¹³. SSRs are considered promising tools for gene therapy because they catalyze the precise cleavage, strand exchange, and rejoining of DNA fragments at defined recombination targets¹⁴ without relying on the endogenous repair of double-strand breaks which can induce indels, translocations, other DNA rearrangements, or p53 activation¹⁵⁻¹⁸. The reactions catalyzed by SSRs can result in the direct replacement, insertion, or deletion of target DNA fragments with efficiencies exceeding those of homology-directed repair^{14,19}.

[1604] Although SSRs offer many advantages, they are not widely used because they have a strong innate preference for their cognate target sequence. The recognition sequences of SSRs are typically ≥20 base pairs and thus unlikely to occur in the genomes of humans or model organisms. Further, the native substrate preferences of SSRs are not easily altered, even with extensive laboratory engineering or evolution²⁰. This limitation is overcome by using PE to directly introduce recombinase targets into the genome, or to modify endogenous genomic sequences which natively resemble recombinase targets. Subsequent exposure of the cell to recombinase protein will permit precise and efficient genomic modification directed by the location and orientation of the recombinase target(s) (FIG. 64).

[1605] PE-mediated introduction of recombinase targets could be particularly useful for the treatment of genetic diseases which are caused by large-scale genomic defects, such as gene loss, inversion, or duplication, or chromosomal translocation¹⁻⁷ (Table 6). For example, Williams-Beuren syndrome is a developmental disorder caused by a deletion of 24 in chromosome 721. No technology exists currently for the efficient and targeted insertion of multiple entire genes in living cells (the potential of PE to do such a full-length gene insertion is currently being explored but has not yet been established); however, recombinase-mediated integration at a target inserted by PE offers one approach towards a permanent cure for this and other diseases. In addition, targeted introduction of recombinase recognition sequences could be highly enabling for applications including generation of transgenic plants, animal research models, bioproduction cell lines, or other custom eukaryotic cell lines. For example, recombinase-mediated genomic rearrangement in transgenic plants at PE-specific targets could overcome one of the bottlenecks to generating agricultural crops with improved properties^{8,9}.

[1606] A number of SSR family members have been characterized and their target sequences described, including natural and engineered tyrosine recombinases (TABLE 7), large serine integrases (TABLE 8), serine resolvases (TABLE 9), and tyrosine integrases (TABLE 10). Modified target sequences that demonstrate enhanced rates of genomic integration have also been described for several SSRs²²⁻³⁰. In addition to natural recombinases, programmable recombinases with distinct specificities have been developed³¹⁻⁴⁰. Using PE, one or more of these recognition sequences could be introduced into the genomic at a specified location, such as a safe harbor locus⁴¹⁻⁴³, depending on the desired application.

[1607] For example, introduction of a single recombinase target in the genome would result in integrative recombination with a DNA donor template (FIG. 64B). Serine integrases, which operate robustly in human cells, may be especially well-suited for gene integration^{44,45}. Additionally, introduction of two recombinase targets could result in deletion of the intervening sequence, inversion of the intervening sequence, chromosomal translocation, or cassette exchange, depending on the identity and orientation of the targets (FIGS. 64C-64F). By choosing endogenous sequences that already closely resemble recombinase targets, the scope of editing required to introduce the complete recombinase target would be reduced.

[1608] Finally, several recombinases have been demonstrated to integrate into human or eukaryotic genomes at natively occurring pseudosites⁴⁶⁻⁶⁴. PE editing could be used to modify these loci to enhance rates of integration at these natural pseudosites, or alternatively, to eliminate pseudosites that may serve as unwanted off-target sequences.

[1609] This report describes a general methodology for introducing recombinase target sequences in eukaryotic genomes using PE, the applications of which are nearly limitless. The genome editing reactions are intended for use with “prime editor,” a chimeric fusion of a CRISPR/Cas9 protein and a reverse-transcriptase domain, which utilizes a custom prime editing guide RNA (PEgRNA). By extension, Cas9 tools and homology-directed repair (HDR) pathways may also be exploited to introduce recombinase targets through DNA templates by lowering the rates of indels using several techniques⁶⁵⁻⁶⁷. A proof-of-concept experiment in human cell culture is shown in FIG. 65.

TABLE 6
Examples of genetic diseases linked
to large-scale genomic modifications.

| Disease | Source | Cause |
|---|---|---|
| Trisomy 17p | 68 | Gene duplication |
| Charcot-Marie-Tooth | 69 | Gene duplication |
| Smith-Magenis syndrome | 70 | Gene deletion |
| Williams-Beuren | 21 | Gene deletion |
| De la Chapelle syndrome | 71 | Chromosomal translocation |
| Down syndrome (some [symbol] | 72 | Chromosomal translocation |
| Hemophilia A | 73 | Gene inversion |
| Hunter syndrome | 74 | Gene inversion |

[symbol]

indicates data missing or illegible when filed

TABLE 7
Tyrosine recombinases and SSR target sequences.

| cRecombinase | Source | Target | Name |
|---|---|---|---|
| Cre | 75 | ATAACTTCGTATAGCATACATTATACG | loxP |
| | | AAGTTAT (SEQ ID NO: 517) | |
| Dre | 76 | TAACTTTAAATAATGCCAATTATTTAA | rox |
| | | AGTTA (SEQ ID NO: 518) | |
| VCre | 77 | TCAATTTCTGAGAACTGTCATTCTCGG | loxV |
| | | AAATTGA (SEQ ID NO: 519) | |
| SCre | 77 | CTCGTGTCCGATAACTGTAATTATCGG | loxS |
| | | ACATGAT (SEQ ID NO: 520) | |
| Flp | 78 | GAAGTTCCTATTCTCTAGAAAGTATAG | FRT |
| | | GAACTTC (SEQ ID NO: 521) | |
| B2 | 79 | GAGTTTCATTAAGGAATAACTAATTCC | loxB |
| | | CTAATGAAACTC (SEQ ID NO: 522) | |
| B3 | 79 | GGTTGCTTAAGAATAAGTAATTCTTAA | loxB3 |
| | | GCAACC (SEQ ID NO: 523) | |
| Kw | 80 | ACGAAAAATGGTAAGGAATAGACCAT | |
| | | TCCTTACCATTTTTGGT (SEQ ID NO: | |
| | | 524) | |
| R | 81 | TTGATGAAAGAATAACGTATTCTTTCA | RS |
| | | TCAA (SEQ ID NO: 525) | |
| TD1-40 | 82 | GTGCGTCAAATAATAACGTATTATTTG | TDRS |
| | | ACACTT (SEQ ID NO: 526) | |
| Vika | 83 | AATAGGTCTGAGAACGCCCATTCTCAG | vox |
| | | ACGTATT (SEQ ID NO: 527) | |
| Nigri | 84 | TGAATGTCCTATAATTACACTTATAGG | nox |
| | | ACATTCA (SEQ ID NO: 528) | |
| Panto | 84 | GAAACTTTAAATAATAAGTCTTATTTA | pox |
| | | AAGTTTC (SEQ ID NO: 529) | |
| Kd | 79 | AAACGATATCAGACATTTGTCTGATA | loxK |
| | | ATGCTTCATTATCAGACAAATGTCTG | |
| | | ATATCGTTT (SEQ ID NO: 530) | |
| Fre | 85 | ATATATACGTATATAGACATATATACG | loxH |
| | | TATATAT (SEQ ID NO: 531) | |
| CreALSHG | 86 | ATAACTCTATATAATGTATGCTATATA | loxM7 |
| | | GAGTTAT (SEQ ID NO: 532) | |
| Tre | 87 | ACAACATCCTATTACACCCTATATGCC | loxLTR |
| | | AACATGG (SEQ ID NO: 533) | |
| Bred 1 | 12 | AACCCACTGCTTAAGCCTCAATAAAGC | loxBTR |
| | | TTGCCTT (SEQ ID NO: 534) | |
| Cre-R3M3 | 88 | GATACAACGTATATACCTTTCTATACG | loxK2 |
| | | TTGTTTA (SEQ ID NO: 535) | |

TABLE 8
Large serine integrases and SSR target sequences.

| Integrase | Source | Left Target | Right Target |
|---|---|---|---|
| Bxbl | 89 | GGTTTGTCTGGTCAACCACC | GGCTTGTCGACGACGGCGG |
| | | GCGGTCTCAGTGGTGTACGG | TCTCCGTCGTCAGGATCAT (SEQ |
| | | TACAAACC (SEQ ID NO: 536) | ID NO: 537) |
| phiC31 | 90 | GTGCCCCAACTGGGGTAACC | TGCGGGTGCCAGGGCGTGC |
| | | TTTGAGTTCTCTCAGTTGGG | CCTTGGGCTCCCCGGGCGCG |
| | | GG (SEQ ID NO: 538) | TACTCC (SEQ ID NO: 539) |
| R4 | 91 | TGTTCCCCAAAGCGATACCA | GCATGTTCCCCAAAGCGATA |
| | | CTTGAAGCAGTGGTACTGCT | CCACTTGAAGCAGTGGTACT |
| | | TGTGGGTACA (SEQ ID NO: | GCTTGTGGGTACACTCTGCG |
| | | 540) | GGTG (SEQ ID NO: 541) |
| phiBT1 | 92 | GGTGCTGGGTTGTTGTCTCT | CAGGTTTTTGACGAAAGTGA |
| | | GGACAGTGATCCATGGGAA | TCCAGATGATCCAG (SEQ ID |
| | | ACTACTCAGCACC (SEQ ID | NO: 543) |
| | | NO: 542) | |
| MJ1 | 93 | ATTTTAGGTATATGATTTTGT | CAAAGGATCACTGAATCAA |
| (phiFC1) | | TTATTAGTGTAAATAACACT | AAGTATTGCTCATCCACGCG |
| | | ATGTACCTAAAAT (SEQ ID | AAA (SEQ ID NO: 545) |
| | | NO: 544) | |
| MR11 | 94 | TTTGTGCGGAACTACGAACA | CGAAAATGTATGGAGGCAC |
| | | GTTCATTAATACGAAGTGTA | TTGTATCAATATAGGATGTA |
| | | CAAACTTCCATACAA (SEQ | TACCTTCGAAGACACTT |
| | | ID NO: 546) | (SEQ ID NO: 547) |
| TP901-1 | 95 | GAGTTTTTATTTCGTTTATTT | ATGCCAACACAATTAACATC |
| | | CAATTAAGGTAACTAAAAA | TCAATCAAGGTAAATGCTTT |
| | | ACTCCTTTTAAGG (SEQ ID | TTGCTTTTTTTGC (SEQ ID |
| | | NO: 548) | NO: 549) |
| A118 | 96 | TTCCTCGTTTTCTCTCGTTGG | TTTCGGATCAAGCTATGAAG |
| | | AAGAAGAAGAAACGAGAAA | GACGCAAAGAGGGAACTAA |
| | | (SEQ ID NO: 550) | A(SEQ ID NO: 551) |
| U153 | 97 | TTCCTCGTTTTCTCTCGTTGG | TTTCGGATCAAGCTATGAAG |
| | | ACGGAAACGAATC | GAGAAAGACGCAAAGAGGGAACTAA |
| | | (SEQ ID NO: 552) | A (SEQ ID NO: 553) |
| phiRV1 | 98 | GTAGTGTATCTCACAGGTCC | GAAGGTGTTGGTGCGGGGT |
| | | ACGGTTGGCCGTGGACTGCT | TGGCCGTGGTCGAGGTGGG |
| | | GAAGAACATTCC (SEQ ID | GT (SEQ ID NO: 555) |
| | | NO: 554) | |
| phi370.1 | 99 | AAAAAAATACAGCGTTTTTC | TTGTAAAGGAGACTGATAA |
| | | ATGTACAACTATACTAGTTG | TGGCATGTACAACTATACTC |
| | | TAGTGCCTAAAA (SEQ ID | GTCGGTAAAAAGGCA (SEQ |
| | | NO: 556) | ID NO: 557) |
| TG1 | 100 | TCCAGCCCAACAGTGTTAGT | GATCAGCTCCGCGGGCAAG |
| | | CTTTGCTCTTACCCAGTTGG | ACCTTTCTCCTTCACGGGGT |
| | | GCGGGA (SEQ ID NO: 558) | GGAAGGTC (SEQ ID NO: 559) |
| WB | 101 | CTAGTTTTAAAGTTGGTTAT | CGGAAGGTAGCGTCAACGA |
| | | TAGTTACTGTGATATTTATC | TAGGTGTAACTGTCGTGTTT |
| | | ACGGTACCCAATAACCAATG | GTAACGGTACTTCCAACAGC |
| | | AAT (SEQ ID NO: 560) | TGGCGCCGCCAC (SEQ ID |
| | | | NO: 561) |
| BL3 | 102 | CAATGAAAAACTAGGCATGT | TTTCCACAGACAACTCACGT |
| | | AGAAGTTGTTTGT (SEQ ID | GGAGGTAGTCAC (SEQ ID |
| | | NO: 562) | NO: 563) |
| SprA | 103 | TGTAGTAAGTATCTTAATAT | CACCCATTGTGTTCACAGGA |
| | | ACAGCTTTATCTGTTTTTTAA | GATACAGCTTTATCTGTACT |
| | | GATACTTACTACTTT (SEQ ID | GATATTAATGACATGCTG |
| | | NO: 564) | (SEQ ID NO: 565) |
| phiJoe | 104 | AGTTGTGGCCATGTGTCCAT | ATCTGGATGTGGGTGTCCAT |
| | | CTGGGGGCAGATGGAGACG | CTGCGGGCAGACGCCGCAG |
| | | GGGTCACA (SEQ ID NO: 566) | TCGAAGCACGG (SEQ ID NO: |
| | | | 567) |
| phiK38 | 105 | CCCTAATACGCAAGTCGATA | GAGCGCCGGATCAGGGAGT |
| | | ACTCTCCTGGGAGCGTTGAC | GGACGGCCTGGGAGCGCTA |
| | | AACTTGCGCACCCTGATCTG | CACGCTGTGGCTGCGGTCGG |
| | | (SEQ ID NO: 569) | TGC (SEQ ID NO: 570) |
| Int2 | 105 | GCTCATGTATGTGTCTACGC | GGACGGCGCAGAAGGGGAG |
| | | GAGATTCTCGCCCGAGAACT | TAGCTCTTCGCCGGACCGTC |
| | | TCTGCAAGGCACTGCTCTTG | GACATACTGCTCAGCTCGTC |
| | | GCT (SEQ ID NO: 571) | (SEQ ID NO: 572) |
| Int3 | 105 | ATGGATAAAAAAATACAGC | GTTTGTAAAGGAGACTGAT |
| | | GTTTTTCATGTACAACTATA | AATGGCATGTACAACTATAC |
| | | CTAGTTGTAGTGCCTAAATA | TCGTCGGTAAAAAGGCATCT |
| | | ATGCTT (SEQ ID NO: 573) | TAT (SEQ ID NO: 574) |
| Int4 | 105 | AAAAATTACAAAGTTTTCAA | TTCCAAAGAGCGCCCAACG |
| | | CCCTTGATTTGAATTAGCGG | CGACCTGAAATTTGAATAA |
| | | TCAAATAATTTGTAATTCGT | GACTGCTGCTTGTGTAAAGG |
| | | TT (SEQ ID NO: 575) | CGATGATT (SEQ ID NO: 576) |
| Int7 | 105 | GTGTTATAAACCTGTGTGAG | AGACGAGAAACGTTCCGTC |
| | | AGTTAAGTTTACATGCCTAA | CGTCTGGGTCAGTTGGGCAA |
| | | CCTTAACTTTTACGCAGGTT | AGTTGATGACCGGGTCGTCC |
| | | CAGCTT (SEQ ID NO: 577) | GTT (SEQ ID NO: 578) |
| Int8 | 105 | TTAATAAACTATGGAAGTAT | CAATCATCAGATAACTATGG |
| | | GTACAGTCTTGCAATGTTGA | CGGCACGTGCATTAACCAC |
| | | GTGAACAAACTTCCATAATA | GGTTGTATCCCGTCTAAAGT |
| | | AAAT (SEQ ID NO: 579) | ACTCGT (SEQ ID NO: 580) |
| Int9 | 105 | GTGGTTGTTTTTGTTGGAAG | TTTATATTGCGAAAAATAAT |
| | | TGTGTATCAGGTATCTGCAT | TGGCGAACGAGGTAACTGG |
| | | AGTTATTCCGAACTTCCAAT | ATACCTCATCCGCCAATTAA |
| | | TA (SEQ ID NO: 581) | AATTTG (SEQ ID NO: 582) |
| Int10 | 105 | GGAAAATATAAATAATTTTA | AGCACGCTGATAATCAGCA |
| | | GTAACCTACATCTCAATCAA | AGACCACCAACATTTCCACC |
| | | GGATAGTAAAACTCTCACTC | AATGTAAAAGCTTTAACCTT |
| | | TT (SEQ ID NO: 583) | AGC (SEQ ID NO: 584) |
| Int11 | 105 | GTTTATATGTTTACTAATAA | ATGGATTTTGCAGATTCCCA |
| | | GACGCTCTCAACCCATAAAG | GATGCCCCTACAGAAAGAG |
| | | TCTTATTAGTAAACATATTT | GTACAAAACATTTATTGGAA |
| | | CAACT (SEQ ID NO: 585) | TTAATT (SEQ ID NO: 586) |
| Int12 | 105 | TTTTTGTATGTTAGTTGTGTC | GTTCGTGGTAACTATGGGTG |
| | | ACTGGGTAGACCTAAATAGT | GTACAGGTGCCACATTAGTT |
| | | GACACAACTGCTATTAAAAT | GTACCATTTATGTTTATGTG |
| | | TTAA (SEQ ID NO: 587) | GTTAAC (SEQ ID NO: 588) |
| Int13 | 105 | CAATAACGGTTGTATTTGTA | GCATACATTGTTGTTGTTTT |
| | | GAACTTGACCAGTTGTTTTA | TCCAGATCCAGTTGGTCCTG |
| | | GTAACATAAATACAACTCCG | TAAATATAAGCAATCCATGT |
| | | AATA (SEQ ID NO: 589) | GAGT (SEQ ID NO: 590) |
| LI | 106 | GTTTAGTATCTCGTTATCTCT | TAACTTTTTCGGATCGAGTT |
| | | CGTTGGAGGGAGAAGAAAC | ATGATGGACGTAAAGAGGG |
| | | GGGATACCAAAA (SEQ ID | AACAAAGCATCTA (SEQ ID |
| | | NO: 591) | NO: 592) |
| Peaches | 107 | TAGTTTCCAATGTTACAGGA | CGGTCTCCATCGGGATCTGC |
| | | ACTGCTGGCAGAATCCAACA | TGATCGAGCAGCATGCCGA |
| | | CATTGGAAGTCG (SEQ ID | CCA (SEQ ID NO: 594) |
| | | NO: 593) | |
| Bxz2 | 107 | TAACCGCAAGTGTACATCCC | CGGTCTCCATCGGGATCTGC |
| | | TCGGCTGGCCGAGACAAGTA | TGATCGAGCAGCATGCCGA |
| | | CAGTTGCGACAG (SEQ ID | CCA (SEQ ID NO: 596) |
| | | NO: 595) | |
| SV1 | 108 | ATGTGGTCCTTTAGATCCAC | CATCAGGGCGGTCAGGCCG |
| | | TGACGTGGGTCAGTGTCTCT | TAGATGTGGAAGAAACGGC |
| | | AAAGGACTCGCG (SEQ ID | AGCACGGCGAGGACG (SEQ |
| | | NO: 597) | ID NO: 598) |

TABLE 9
Serine resolvases and SSR target sequences.

| Resolvase | Source | Left Target | Right Target |
|---|---|---|---|
| Gin | 109 | CGTTTCCTGTAAACCGAGGT | CGTTTCCTGTAAACCGAGGT |
| | | TTTGGATAAACA (SEQ ID | TTTGGATAATGG (SEQ ID |
| | | NO: 599) | NO: 600) |
| Cin | 110 | GAGTTCTCTTAAACCAAGGT | GAGTTCTCTTAAACCAAGGT |
| | | TTAGGATTGAAA (SEQ ID | ATTGGATAACAG (SEQ ID |
| | | NO: 601) | NO: 602) |
| Hin | 111 | TGGTTCTTGAAAACCAAGGT | AAATTTTCCTTTTTGGAAGG |
| | | TTTTGATAAAGC (SEQ ID NO: | TTTTTGATAACCA (SEQ ID |
| | | 603) | NO: 604) |
| Min | 112 | GCCTTCCCCTAAACCAACGT | GCCTTCCCCCAAACCAAGGT |
| | | TTTTATGCCGCC (SEQ ID NO: | AATCAAGAACGC (SEQ ID |
| | | 605) | NO: 606) |
| Sin | 113 | TTGTGAAATTTGGGTACACC | CGTATGATTAGGGTGTATAT |
| | | CTAATCATACAA (SEQ ID | TAATTT (SEQ ID NO: 608) |
| | | NO: 607) | |

TABLE 10
Tyrosine integrases and target sequences.

| Integrase | Source | attP | attB |
|---|---|---|---|
| HK022 | 114 | CAAATGATTTTATTTTGACTAATAA | GCACTTTAGGTGA |
| | | TGACCTACTTACATTAATTTACTGAT | AAAAGGTT |
| | | AATTAAAGAGATTTTAAATATACAA | (SEQ ID NO: 610) |
| | | CTTATTCACCTAAAGGATGACAAAA | |
| | | (SEQ ID NO: 609) | |
| P22 | 115 | CTAAGTGGTTTGGGACAAAAATGGG | GCAGCGCATTCGT |
| | | ACATACAAATCTTTGCATCGGTTTG | AATGCGAAGGTCGT |
| | | CAAGGCTTTGCATGTCTTTCGAAGA | (SEQ ID NO: 613) |
| | | TGGGACGTGTGAGCGCAGGTATGAC | |
| | | GTGGTATGTGTTGACTTAAAAGGTA | |
| | | GTTCTTATAATTCGTAATGCGAAGG | |
| | | TCGTAGGTTCGACTCCTATTATCGG | |
| | | CACCAGTTAAATCAAATACTTACGT | |
| | | ATTATTCGTGCCTTCCTTATTTTTAC | |
| | | TGTGGGACATATTTGGGACAGAAGT | |
| | | ACCAAAAA (SEQ ID NO: 612) | |
| L5 | 116 | GCGATCCCCATCCGCGACGTGCCAA | GAGCGGGCGACG |
| | | CTAGGTCTCCTCTCGTCGTGAACAA | GGAATCGAACCCG |
| | | GGCTACCGGGTTGCAACTCCTGTGC | CGTAGCTAGTTTG |
| | | AACTCTCAGGCTTCAACGCGCTTCT | GAAGA |
| | | ACGACCTGCAATTTCTTTCCACTTA | (SEQ ID NO: 615) |
| | | GAGGATGCAGCCGAGAGGGGTAAA | |
| | | AACCTATCTTGACCGGCCCATATGT | |
| | | GGTCGGCAGACACCCATTCTTCCAA | |
| | | ACTAGCTACGCGGGTTCGATTCCCG | |
| | | TCGCCCGCTCCGCTGGTCAGAGGGT | |
| | | GTTTTCGCCCTCTGGCCATTTTTCTT | |
| | | TCCAGGGGTCTGCAACTCTTGTGCG | |
| | | ACTCTTCTGACCTGGGCATACGCGG | |
| | | TTGCAACGCATCCCTGATCTGGCTA | |
| | | CTTTCGATGCTGACAAACGAATAGA | |
| | | GCCCCCCGCCTGCGCGAACAGACG | |
| | | AGGGGCATTCACA (SEQ ID | |
| | | NO: 614) | |

### REFERENCES CITED IN EXAMPLE 17

[1610] Each of the following references are cited in Example 17, each of which are incorporated herein by reference.
[1611] 1. Feuk, L. Inversion variants in the human genome: role in disease and genome architecture. Genome Med 2, 11 (2010).
[1612] 2. Zhang, F., Gu, W., Hurles, M. E. & Lupski, J. R. Copy number variation in human health, disease, and evolution. Annu Rev Genomics Hum Genet 10, 451-481 (2009).
[1613] 3. Shaw, C. J. & Lupski, J. R. Implications of human genome architecture for rearrangement-based disorders: the genomic basis of disease. Hum Mol Genet 13 Spec No 1, R57-64 (2004).
[1614] 4. Carvalho, C. M., Zhang, F. & Lupski, J. R. Evolution in health and medicine Sackler colloquium: Genomic disorders: a window into human gene and genome evolution. Proc Natl Acad Sci USA 107 Suppl 1, 1765-1771 (2010).
[1615] 5. Rowley, J. D. Chromosome translocations: dangerous liaisons revisited. Nat Rev Cancer 1, 245-250 (2001).
[1616] 6. Aplan, P. D. Causes of oncogenic chromosomal translocation. Trends Genet 22, 46-55 (2006).
[1617] 7. McCarroll, S. A. & Altshuler, D. M. Copy-number variation and association studies of human disease. Nat Genet 39, S37-42 (2007).
[1618] 8. Wijnker, E. & de Jong, H. Managing meiotic recombination in plant breeding. Trends Plant Sci 13, 640-646 (2008).
[1619] 9. Petolino, J. F., Srivastava, V. & Daniell, H. Editing Plant Genomes: a new era of crop improvement. Plant Biotechnol J 14, 435-436 (2016).
[1620] 10. Smith, M. C. M. Phage-encoded Serine Integrases and Other Large Serine Recombinases. Microbiol Spectr 3 (2015).
[1621] 11. Meinke, G., Bohm, A., Hauber, J., Pisabarro, M. T. & Buchholz, F. Cre Recombinase and Other Tyrosine Recombinases. Chem Rev 116, 12785-12820 (2016).
[1622] 12. Karpinski, J. et al. Directed evolution of a recombinase that excises the provirus of most HIV-1 primary isolates with high specificity. Nat Biotechnol 34, 401-409 (2016).
[1623] 13. Olorunniji, F. J., Rosser, S. J. & Stark, W. M. Site-specific recombinases: molecular machines for the Genetic Revolution. Biochem J 473, 673-684 (2016).
[1624] 14. Grindley, N. D., Whiteson, K. L. & Rice, P. A. Mechanisms of site-specific recombination. Annu Rev Biochem 75, 567-605 (2006).
[1625] 15. Lukacsovich, T., Yang, D. & Waldman, A. S. Repair of a specific double-strand break generated within a mammalian chromosome by yeast endonuclease I-SceI. Nucleic Acids Res 22, 5649-5657 (1994).
[1626] 16. Rouet, P., Smih, F. & Jasin, M. Introduction of double-strand breaks into the genome of mouse cells by expression of a rare-cutting endonuclease. Mol Cell Biol 14, 8096-8106 (1994).
[1627] 17. Jeggo, P. A. DNA breakage and repair. Adv Genet 38, 185-218 (1998).
[1628] 18. Haapaniemi, E., Botla, S., Persson, J., Schmierer, B. & Taipale, J. CRISPR-Cas9 genome editing induces a p53-mediated DNA damage response. Nat Med 24, 927-930 (2018).
[1629] 19. Wang, B. et al. Highly efficient CRISPR/HDR-mediated knock-in for mouse embryonic stem cells and zygotes. Biotechniques 59, 201-202, 204, 206-208 (2015).
[1630] 20. Bogdanove, A. J., Bohm, A., Miller, J. C., Morgan, R. D. & Stoddard, B. L. Engineering altered protein-DNA recognition specificity. Nucleic Acids Res 46, 4845-4871 (2018).
[1631] 21. Tassabehji, M. Williams-Beuren syndrome: a challenge for genotype-phenotype correlations. Hum Mol Genet 12 Spec No 2, R229-237 (2003).
[1632] 22. Araki, K., Araki, M. & Yamamura, K. Targeted integration of DNA using mutant lox sites in embryonic stem cells. Nucleic Acids Res 25, 868-872 (1997).
[1633] 23. Araki, K., Okada, Y., Araki, M. & Yamamura, K. Comparative analysis of right element mutant lox sites on recombination efficiency in embryonic stem cells. BMC Biotechnol 10, 29 (2010).
[1634] 24. Thomson, J. G., Rucker, E. B., 3rd & Piedrahita, J. A. Mutational analysis of loxP sites for efficient Cre-mediated insertion into genomic DNA. Genesis 36, 162-167 (2003).
[1635] 25. Jusiak, B. et al. Comparison of Integrases Identifies Bxb1-GA Mutant as the Most Efficient Site-Specific Integrase System in Mammalian Cells. ACS Synth Biol 8, 16-24 (2019).
[1636] 26. Xie, F. et al. Adjusting the attB site in donor plasmid improves the efficiency of PhiC31 integrase system. DNA Cell Biol 31, 1335-1340 (2012).
[1637] 27. Gupta, M., Till, R. & Smith, M. C. Sequences in attB that affect the ability of phiC31 integrase to synapse and to activate DNA cleavage. Nucleic Acids Res 35, 3407-3419 (2007).
[1638] 28. Kolot, M., Malchin, N., Elias, A., Gritsenko, N. & Yagil, E. Site promiscuity of coliphage HK022 integrase as tool for gene therapy. Gene Ther 22, 602 (2015).
[1639] 29. Gaj, T., Mercer, A. C., Sirk, S. J., Smith, H. L. & Barbas, C. F., 3rd A comprehensive approach to zinc-finger recombinase customization enables genomic targeting in human cells. Nucleic Acids Res 41, 3937-3946 (2013).
[1640] 30. Chuang, K., Nguyen, E., Sergeev, Y. & Badea, T. C. Novel Heterotypic Rox Sites for Combinatorial Dre Recombination Strategies. G3 (Bethesda) 6, 559-571 (2015).
[1641] 31. Chaikind, B., Bessen, J. L., Thompson, D. B., Hu, J. H. & Liu, D. R. A programmable Cas9-serine recombinase fusion protein that operates on DNA sequences in mammalian cells. Nucleic Acids Res 44, 9758-9770 (2016).
[1642] 32. Gaj, T., Mercer, A. C., Gersbach, C. A., Gordley, R. M. & Barbas, C. F. Structure-guided reprogramming of serine recombinase DNA sequence specificity. P Natl Acad Sci USA 108, 498-503 (2011).
[1643] 33. Gaj, T., Sirk, S. J. & Barbas, C. F., 3rd Expanding the scope of site-specific recombinases for genetic and metabolic engineering. Biotechnol Bioeng 111, 1-15 (2014).
[1644] 34. Akopian, A., He, J., Boocock, M. R. & Stark, W. M. Chimeric recombinases with designed DNA sequence recognition. Proc Natl Acad Sci USA 100, 8688-8691 (2003).
[1645] 35. Prorocic, M. M. et al. Zinc-finger recombinase activities in vitro. Nucleic Acids Research 39, 9316-9328 (2011).
[1646] 36. Gersbach, C. A., Gaj, T., Gordley, R. M., Mercer, A. C. & Barbas, C. F. Targeted plasmid integration into the human genome by an engineered zinc-finger recombinase. Nucleic Acids Research 39, 7868-7878 (2011).
[1647] 37. Sirk, S. J., Gaj, T., Jonsson, A., Mercer, A. C. & Barbas, C. F. Expanding the zinc-finger recombinase repertoire: directed evolution and mutational analysis of serine recombinase specificity determinants. Nucleic Acids Research 42, 4755-4766 (2014).
[1648] 38. Gaj, T. & Barbas, C. F., 3rd Genome engineering with custom recombinases. Methods Enzymol 546, 79-91 (2014).
[1649] 39. Olorunniji, F. J., Rosser, S. J. & Marshall Stark, W. Purification and In Vitro Characterization of Zinc Finger Recombinases. Methods Mol Biol 1642, 229-245 (2017).
[1650] 40. Proudfoot, C., McPherson, A. L., Kolb, A. F. & Stark, W. M. Zinc finger recombinases with adaptable DNA sequence specificity. PLoS One 6, e19537 (2011).
[1651] 41. Trion, S. et al. Identification and targeting of the ROSA26 locus in human embryonic stem cells. Nat Biotechnol 25, 1477-1482 (2007).
[1652] 42. Sadelain, M., Papapetrou, E. P. & Bushman, F. D. Safe harbours for the integration of new DNA in the human genome. Nat Rev Cancer 12, 51-58 (2012).
[1653] 43. Pellenz, S. et al. New human chromosomal safe harbor sites for genome engineering with CRISPR/Cas9, TAL effector and homing endonucleases. bioRxiv (2019).
[1654] 44. Brown, W. R., Lee, N.C., Xu, Z. & Smith, M. C. Serine recombinases as tools for genome engineering. Methods 53, 372-379 (2011).
[1655] 45. Xu, Z. et al. Accuracy and efficiency define Bxb1 integrase as the best of fifteen candidate serine recombinases for the integration of DNA into the human genome. BMC Biotechnol 13, 87 (2013).
[1656] 46. Thyagarajan, B., Guimaraes, M. J., Groth, A. C. & Calos, M. P. Mammalian genomes contain active recombinase recognition sites. Gene 244, 47-54 (2000).
[1657] 47. Shultz, J. L., Voziyanova, E., Konieczka, J. H. & Voziyanov, Y. A genome-wide analysis of FRT-like sequences in the human genome. PLoS One 6, e18077 (2011).
[1658] 48. Thyagarajan, B., Olivares, E. C., Hollis, R. P., Ginsburg, D. S. & Calos, M. P. Site-specific genomic integration in mammalian cells mediated by phage phiC31 integrase. Mol Cell Biol 21, 3926-3934 (2001).
[1659] 49. Sivalingam, J. et al. Biosafety assessment of site-directed transgene integration in human umbilical cord-lining cells. Mol Ther 18, 1346-1356 (2010).
[1660] 50. Ortiz-Urda, S. et al. Stable nonviral genetic correction of inherited human skin disease. Nat Med 8, 1166-1170 (2002).
[1661] 51. Chalberg, T. W. et al. Integration specificity of phage phiC31 integrase in the human genome. J Mol Biol 357, 28-48 (2006).
[1662] 52. Thyagarajan, B. et al. Creation of engineered human embryonic stem cell lines using phiC31 integrase. Stem Cells 26, 119-126 (2008).
[1663] 53. Olivares, E. C. et al. Site-specific genomic integration produces therapeutic Factor IX levels in mice. Nat Biotechnol 20, 1124-1128 (2002).
[1664] 54. Hollis, R. P. et al. Phage integrases for the construction and manipulation of transgenic mammals. Reprod Biol Endocrinol 1, 79 (2003).
[1665] 55. Held, P. K. et al. In vivo correction of murine hereditary tyrosinemia type I by phiC31 integrase-mediated gene delivery. Mol Ther 11, 399-408 (2005).
[1666] 56. Ma, H. et al. PhiC31 integrase induces efficient site-specific recombination in the Capra hircus genome. DNA Cell Biol 33, 484-491 (2014).
[1667] 57. Bi, Y. et al. Pseudo attP sites in favor of transgene integration and expression in cultured porcine cells identified by Streptomyces phage phiC31 integrase. BMC Mol Biol 14, 20 (2013).
[1668] 58. Ma, Q. W. et al. Identification of pseudo attP sites for phage phiC31 integrase in bovine genome. Biochem Biophys Res Commun 345, 984-988 (2006).
[1669] 59. Qu, L. et al. Global mapping of binding sites for phic31 integrase in transgenic maden-darby bovine kidney cells using ChIP-seq. Hereditas 156, 3 (2019).
[1670] 60. Ghahfarokhi, M. K., Dormiani, K., Mohammadi, A., Jafarpour, F. & Nasr-Esfahani, M. H. Blastocyst Formation Rate and Transgene Expression are Associated with Gene Insertion into Safe and Non-Safe Harbors in the Cattle Genome. Sci Rep 7, 15432 (2017).
[1671] 61. Groth, A. C., Fish, M., Nusse, R. & Calos, M. P. Construction of transgenic Drosophila by using the site-specific integrase from phage phiC31. Genetics 166, 1775-1782 (2004).
[1672] 62. Chalberg, T. W., Genise, H. L., Vollrath, D. & Calos, M. P. phiC31 integrase confers genomic integration and long-term transgene expression in rat retina. Invest Ophthalmol Vis Sci 46, 2140-2146 (2005).
[1673] 63. Keravala, A. et al. A diversity of serine phage integrases mediate site-specific recombination in mammalian cells. Mol Genet Genomics 276, 135-146 (2006).
[1674] 64. Lei, X., Wang, L., Zhao, G. & Ding, X. Site-specificity of serine integrase demonstrated by the attB sequence preference of BT1 integrase. FEBS Lett 592, 1389-1399 (2018).
[1675] 65. Chu, V. T. et al. Increasing the efficiency of homology-directed repair for CRISPR-Cas9-induced precise gene editing in mammalian cells. Nat Biotechnol 33, 543-548 (2015).
[1676] 66. Yu, C. et al. Small molecules enhance CRISPR genome editing in pluripotent stem cells. Cell Stem Cell 16, 142-147 (2015).
[1677] 67. Paquet, D. et al. Efficient introduction of specific homozygous and heterozygous mutations using CRISPR/Cas9. Nature 533, 125 (2016).
[1678] 68. Martsolf, J. T. et al. Complete trisomy 17p a relatively new syndrome. Ann Genet 31, 172-174 (1988).
[1679] 69. Bird, T. D. in GeneReviews((R)). (eds. M. P. Adam et al.) (Seattle (WA); 1993).
[1680] 70. Smith, A. C. M. et al. in GeneReviews((R)). (eds. M. P. Adam et al.) (Seattle (WA); 1993).
[1681] 71. Dupuy, O. et al. [De La Chapelle syndrome]. Presse Med 30, 369-372 (2001).
[1682] 72. Jyothy, A. et al. Translocation Down syndrome. Indian J Med Sci 56, 122-126 (2002).
[1683] 73. Lakich, D., Kazazian, H. H., Jr., Antonarakis, S. E. & Gitschier, J. Inversions disrupting the factor VIII gene are a common cause of severe haemophilia A. Nat Genet 5, 236-241 (1993).
[1684] 74. Bondeson, M. L. et al. Inversion of the IDS gene resulting from recombination with IDS-related sequences is a common cause of the Hunter syndrome. Hum Mol Genet 4, 615-621 (1995).
[1685] 75. Abremski, K. & Hoess, R. Bacteriophage P1 site-specific recombination. Purification and properties of the Cre recombinase protein. J Biol Chem 259, 1509-1514 (1984).
[1686] 76. Sauer, B. & McDermott, J. DNA recombination with a heterospecific Cre homolog identified from comparison of the pac-c1 regions of P1-related phages. Nucleic Acids Res 32, 6086-6095 (2004).
[1687] 77. Suzuki, E. & Nakayama, M. VCre/VloxP and SCre/SloxP: new site-specific recombination systems for genome engineering. Nucleic Acids Res 39, e49 (2011).
[1688] 78. Sadowski, P. D. The Flp recombinase of the 2-microns plasmid of Saccharomyces cerevisiae. Prog Nucleic Acid Res Mol Biol 51, 53-91 (1995).
[1689] 79. Nern, A., Pfeiffer, B. D., Svoboda, K. & Rubin, G. M. Multiple new site-specific recombinases for use in manipulating animal genomes. Proc Natl Acad Sci USA 108, 14198-14203 (2011).
[1690] 80. Ringrose, L., Angrand, P. O. & Stewart, A. F. The Kw recombinase, an integrase from Kluyveromyces waltii. Eur J Biochem 248, 903-912 (1997).
[1691] 81. Araki, H. et al. Site-specific recombinase, R, encoded by yeast plasmid pSR1. J Mol Biol 225, 25-37 (1992).
[1692] 82. Blaisonneau, J., Sor, F., Cheret, G., Yarrow, D. & Fukuhara, H. A circular plasmid from the yeast Torulaspora delbrueckii. Plasmid 38, 202-209 (1997).
[1693] 83. Karimova, M. et al. Vika/vox, a novel efficient and specific Cre/loxP-like site-specific recombination system. Nucleic Acids Res 41, e37 (2013).
[1694] 84. Karimova, M., Splith, V., Karpinski, J., Pisabarro, M. T. & Buchholz, F. Discovery of Nigri/nox and Panto/pox site-specific recombinase systems facilitates advanced genome engineering. Sci Rep 6, 30130 (2016).
[1695] 85. Buchholz, F. & Stewart, A. F. Alteration of Cre recombinase site specificity by substrate-linked protein evolution. Nat Biotechnol 19, 1047-1052 (2001).
[1696] 86. Santoro, S. W. & Schultz, P. G. Directed evolution of the site specificity of Cre recombinase. Proc Natl Acad Sci USA 99, 4185-4190 (2002).
[1697] 87. Sarkar, I., Hauber, I., Hauber, J. & Buchholz, F. HIV-1 proviral DNA excision using an evolved recombinase. Science 316, 1912-1915 (2007).
[1698] 88. Rufer, A. W. & Sauer, B. Non-contact positions impose site selectivity on Cre recombinase. Nucleic Acids Res 30, 2764-2771 (2002).
[1699] 89. Kim, A. I. et al. Mycobacteriophage Bxb1 integrates into the Mycobacterium smegmatis groEL1 gene. Mol Microbiol 50, 463-473 (2003).
[1700] 90. Brown, D. P., Idler, K. B. & Katz, L. Characterization of the genetic elements required for site-specific integration of plasmid pSE211 in Saccharopolyspora erythraea. J Bacteriol 172, 1877-1888 (1990).
[1701] 91. Matsuura, M. et al. A GENE ESSENTIAL FOR THE SITE-SPECIFIC EXCISION OF ACTINOPHAGE R4 PROPHAGE GENOME FROM THE CHROMOSOME OF A LYSOGEN. The Journal of General and Applied Microbiology 41, 53-61 (1995).
[1702] 92. Gregory, M. A., Till, R. & Smith, M. C. Integration site for Streptomyces phage phiBT1 and development of site-specific integrating vectors. J Bacteriol 185, 5320-5323 (2003).
[1703] 93. Yang, H. Y., Kim, Y. W. & Chang, H. I. Construction of an integration-proficient vector based on the site-specific recombination mechanism of enterococcal temperate phage phiFC1. J Bacteriol 184, 1859-1864 (2002).
[1704] 94. Rashel, M. et al. A novel site-specific recombination system derived from bacteriophage phiMR11. Biochem Biophys Res Commun 368, 192-198 (2008).
[1705] 95. Christiansen, B., Johnsen, M. G., Stenby, E., Vogensen, F. K. & Hammer, K. Characterization of the lactococcal temperate phage TP901-1 and its site-specific integration. J Bacteriol 176, 1069-1076 (1994).
[1706] 96. Loessner, M. J., Inman, R. B., Lauer, P. & Calendar, R. Complete nucleotide sequence, molecular analysis and genome structure of bacteriophage A118 of Listeria monocytogenes: implications for phage evolution. Mol Microbiol 35, 324-340 (2000).
[1707] 97. Lauer, P., Chow, M. Y., Loessner, M. J., Portnoy, D. A. & Calendar, R. Construction, characterization, and use of two Listeria monocytogenes site-specific phage integration vectors. J Bacteriol 184, 4177-4186 (2002).
[1708] 98. Bibb, L. A., Hancox, M. I. & Hatfull, G. F. Integration and excision by the large serine recombinase phiRvl integrase. Mol Microbiol 55, 1896-1910 (2005).
[1709] 99. Canchaya, C. et al. Genome analysis of an inducible prophage and prophage remnants integrated in the Streptococcus pyogenes strain SF370. Virology 302, 245-258 (2002).
[1710] 100. Morita, K. et al. The site-specific recombination system of actinophage TG1. FEMS Microbiol Lett 297, 234-240 (2009).
[1711] 101. Fouts, D. E. et al. Sequencing Bacillus anthracis typing phages gamma and cherry reveals a common ancestry. J Bacteriol 188, 3402-3408 (2006).
[1712] 102. Kilcher, S., Loessner, M. J. & Klumpp, J. Brochothrix thermosphacta bacteriophages feature heterogeneous and highly mosaic genomes and utilize unique prophage insertion sites. J Bacteriol 192, 5441-5453 (2010).
[1713] 103. Lazarevic, V. et al. Nucleotide sequence of the Bacillus subtilis temperate bacteriophage SPbetac2. Microbiology 145 (Pt 5), 1055-1067 (1999).
[1714] 104. Fogg, P. C. M., Haley, J. A., Stark, W. M. & Smith, M. C. M. Genome Integration and Excision by a New Streptomyces Bacteriophage, varphiJoe. Appl Environ Microbiol 83 (2017).
[1715] 105. Yang, L. et al. Permanent genetic memory with >1-byte capacity. Nat Methods 11, 1261-1266 (2014).
[1716] 106. Rutherford, K., Yuan, P., Perry, K., Sharp, R. & Van Duyne, G. D. Attachment site recognition and regulation of directionality by the serine integrases. Nucleic Acids Res 41, 8341-8356 (2013).
[1717] 107. Singh, S., Rockenbach, K., Dedrick, R. M., VanDemark, A. P. & Hatfull, G. F. Cross-talk between diverse serine integrases. J Mol Biol 426, 318-331 (2014).
[1718] 108. Gupta, N. et al. Cross-talk between cognate and noncognate RpoE sigma factors and Zn(2+)-binding anti-sigma factors regulates photooxidative stress response in Azospirillum brasilense. Antioxid Redox Signal 20, 42-59 (2014).
[1719] 109. Kahmann, R., Rudt, F., Koch, C. & Mertens, G. G inversion in bacteriophage Mu DNA is stimulated by a site within the invertase gene and a host factor. Cell 41, 771-780 (1985).
[1720] 110. lida, S., Meyer, J., Kennedy, K. E. & Arber, W. A site-specific, conservative recombination system carried by bacteriophage P1. Mapping the recombinase gene cin and the cross-over sites cix for the inversion of the C segment. EMBO J 1, 1445-1453 (1982).
[1721] 111. Glasgow, A. C., Bruist, M. F. & Simon, M. I. DNA-binding properties of the Hin recombinase. J Biol Chem 264, 10072-10082 (1989).
[1722] 112. lida, S. et al. The Min DNA inversion enzyme of plasmid p15B of Escherichia coli 15T-: a new member of the Din family of site-specific recombinases. Mol Microbiol 4, 991-997 (1990).
[1723] 113. Rowland, S. J., Stark, W. M. & Boocock, M. R. Sin recombinase from Staphylococcus aureus: synaptic complex architecture and transposon targeting. Mol Microbiol 44, 607-619 (2002).
[1724] 114. Kolot, M., Silberstein, N. & Yagil, E. Site-specific recombination in mammalian cells expressing the Int recombinase of bacteriophage HK022. Mol Biol Rep 26, 207-213 (1999).
[1725] 115. Cho, E. H., Nam, C. E., Alcaraz, R., Jr. & Gardner, J. F. Site-specific recombination of bacteriophage P22 does not require integration host factor. J Bacteriol 181, 4245-4249 (1999).
[1726] 116. Lee, M. H., Pascopella, L., Jacobs, W. R., Jr. & Hatfull, G. F. Site-specific integration of mycobacteriophage L5: integration-proficient vectors for Mycobacterium smegmatis, Mycobacterium tuberculosis, and bacille Calmette-Guerin. Proc Natl Acad Sci USA 88, 3111-3115 (1991).

### Example 18—Incorporation of 3′ Toeloop in the Primer Binding Site (Pbs) Improves Pegrna Activity

[1727] In order to further improve PE activity, the inventors contemplated adding a toeloop sequence at the 3′ end of a PEgRNA having a 3′ extension arm. FIG. 71A provides an example of a generic SpCas9 PEgRNA having a 3′ extension arm (top molecule). The 3′ extension arm, in turn, comprises an RT template (that includes that the desired edit) and a primer binding site (PBS) at the 3′ end of the molecule. The molecule terminates with a poly(U) sequence comprising three U nucleobases (i.e., 5′-UUU-3′).

[1728] By contrast, the bottom portion of FIG. 71A shows the same PEgRNA molecule as the top portion of FIG. 71A, but wherein a 9-nucleobase sequence of 5′-GAAANNNNN-3′ has been inserted between the 3′ end of the primer binding site and the 5′ end of the terminal poly(U) sequence. This structure folds back on itself by 180° to form a “toeloop” RNA structure, wherein the sequences of 5′-NNNNN-3′ of the 9-nucleobase insertion anneals with a complementary sequence in the primer binding site, and wherein the 5′-GAAA-3′ portion forms the 180° turn. The features of the toeloop sequence depicted in FIG. 71A is not intended to limit or narrow the scope of possible toeloops that could be used in its place. Further, the sequence of the toeloop will depend upon the complementary sequence of the primer binding site. Essentially though, the toeloop sequence, in various embodiments, may have a first sequence portion that forms a 180°, and a second sequence portion that has a sequence that is complentary to a portion of the primer binding site.

[1729] Without being bound by theory, the toeloop sequence is thought to enable PEgRNAthe use of PEgRNAs with increasingly longer primer binding sites than would otherwise be possible. Longer PBS sequences, in turn, are thought to improve PE activity. PEgRNA More in particular, the likely function of the toeloop is to occlude or at least minimize the PBS from interacting with the spacer. Stable hairpin formation between the PBS and the spacer can lead to an inactive PEgRNA. Without a toeloop, this interaction may require restricting the length of the PBS. Blocking or minimizing the interaction between the spacer and the PBS using a 3′ end toeloop may lead to an improvement in PE activity.

### Example 19—Prime Editing with Alternative Nucleic Acid Templates and Editor Protein Constructs

[1730] Prior to this example, prime editing is described as requiring a PEgRNA. Exemplary embodiments describing possible configurations of suitable PEgRNA for use in prime editing are depicted in FIG. 3A (a PEgRNA with a 5′ extension arm), FIG. 3B (a PEgRNA with a 3′ extension arm), FIG. 3C (an internally extended PEgRNA), FIG. 3D (a PEgRNA with a 3′ extension arm, and comprising a primer binding site, edit template, homology arm, and optional 3′ and 5′ modifier regions, and a region indicated as the DNA synthesis template), and FIG. 3E (a PEgRNA with a 5′ extension arm, and comprising a primer binding site, edit template, homology arm, and optional 3′ and 5′ modifier regions, and a region indicated as the DNA synthesis template). In addition, PEgRNA structure and composition are described extensively herein in the Detailed Description and throughout.

[1731] This Example describes additional design variations of PEgRNAs—in some cases, PEgRNAs which are wholly or partially chemically synthesized outside the cell—that are envisioned to work in conjunction with the prime editors of this Specification. Such alternative designs may improve various aspects of prime editing, including the insertion of longer DNA sequences by prime editing, the use of alternative polymerases (i.e., alternatives to reverse transcriptase) that potentially operate with increased efficiency and/or fidelity, and the use or recruitment of alternative and/or addition prime editor protein effector components to enhance or augment prime editing. In addition, the use of chemically synthesized PEgRNAs may potentially lead to the production of molecules that are more stable and possess desirable features that enhance prime editing efficiency and capabilities.

[1732] PEgRNA serves as the nucleic acid template that encodes the desired edited genetic information that is to be incorporated into a target site. In one aspect, a PEgRNA is created by adding an extension arm to either the 5′ end or 3′ end of an sgRNA (e.g., as shown in the embodiments of FIG. 3A, 3B, 3D, or 3E), or by inserting a similar sequence internally within an sgRNA (e.g., as shown in the embodiment of FIG. 3C), wherein the extension arm comprises a DNA synthesis template that is capable of encoding a ssDNA product by a polymerase (e.g., a reverse transcriptase) and which includes the edited genetic information of interest. The extension arm comprises a primer binding site (PBS) for annealing to the napDNAbp-nicked genomic DNA strand, and a DNA synthesis template to encode t the edited DNA strand of interest, which becomes incorporated into the endogenous DNA target site by replacing the counterpart DNA strand. PEgRNA can be expressed within cells from plasmid DNA or a genomically integrated DNA cassette, or they can be made outside of cells by in vitro transcription or by chemical synthesis and subsequently delivered into cells. Preparation of PEgRNAs outside of cells, particularly by chemical synthesis, offers an opportunity to modify the PEgRNAs substantially. This invention describes alternative designs for prime editing templates (FIG. 72).

(A) DNA synthesis template expressed as a separate molecules from guide RNAs (i.e., DNA
synthesis template provided in trans to the prime editor complex (napDNAbp + guide RNA).

[1733] In various embodiments described herein, prime editing utilizes a single PEgRNA that serves as both the programmable targeting molecules and the edit-encoding molecule. This embodiment is depicted in FIG. 72(a) with a PEgRNA having a 3′ extension arm. However, in some cases, this could be disadvantageous, particularly for more complex PEgRNA molecules such as those that encode a large insertion. These RNAs could contain extensive secondary structure that interferes with the PEgRNA scaffold structure and interactions with Cas9. Alternatively, prime editing can be carried out by substituting a PEgRNA with two separate RNA molecules: an sgRNA, and a trans prime editing RNA template (tPERT), as depicted in FIG. 72B. The sgRNA serves to target Cas9 (or more generally, the napDNAbp) to the desired genomic target site, while the tPERT is used by the polymerase (e.g., a reverse transcriptase) to write new DNA sequence into the target locus.

[1734] In general, simple expression of a tPERT leads to lower editing efficiency compared to a PEgRNA. However, the efficiency of trans prime editing can be enhanced by the introduction of one or more MS2 RNA aptamers into the tPERT RNA, along with a fusion of the MS2 coat protein (MS2cp) to the prime editor protein (to make MS2cp-Cas9-RT). This allows for the MS2 RNA aptamer to bind to the MS2cp, thereby co-localizing the tPERT (which comprises the DNA synthesis template) to the site of editing by the prime editor complex. The MS2 aptamer is preferably placed on the 3′ end of the tPERT to avoid reverse transcription of the aptamer sequence.

[1735] Although this example utilizes the MS2 tagging technique (comprising the MS2 RNA aptamer on the tPERT paired with the MS2cp protein fused to the prime editor), other RNA-protein recruitment systems can be used in the alternative. The general concept envisioned here is that the DNA synthesis template of the tPERT is modified to contain an RNA recruitment secondary structure (e.g., a specialized hairpin like the MS2 aptamer) so that the tPERT may be recruited by a modified prime editor fusion protein that further comprises an RNA-binding protein that specifically recognizes and binds to the RNA recruitment second structure on the tPERT molecule. A review of other RNA-protein recruitment domains are described in the art, for example, in Johansson et al., “RNA recognition by the MS2 phage coat protein,” Sem Virol., 1997, Vol. 8(3): 176-185; Delebecque et al., “Organization of intracellular reactions with rationally designed RNA assemblies,” Science, 2011, Vol. 333: 470-474; Mali et al., “Cas9 transcriptional activators for target specificity screening and paired nickases for cooperative genome engineering,” Nat. Biotechnol., 2013, Vol. 31: 833-838; and Zalatan et al., “Engineering complex synthetic transcriptional programs with CRISPR RNA scaffolds,” Cell, 2015, Vol. 160: 339-350, each of which are incorporated herein by reference in their entireties. Other systems include the PP7 hairpin, which specifically recruits the PCP protein, and the “corn” hairpin, which specifically recruits the Com protein. See Zalatan et al. Any of these well-known recruitment systems may be employed with trans prime editing as described herein.

[1736] The efficiency of the instant tPERT trans prime editing system was tested. Up to 20% efficiency of His6 insertion (18 bp) was achieved at the HEK3 site in HEK293T cells using a tPERT containing a single 3′ MS2 aptamer, a 13-nt primer binding site, and an RT template containing the insertion sequence and 34 nt of homology to the locus, along with an editor containing the MS2cp fused to the N-terminus of PE2. See FIG. 73. The strategy of trans prime editing has the potential to address complications associated with PEgRNAPEgRNA design, and could be more suited for longer RT templates to achieve larger insertion, deletions, or edits at further distances from the prime editor nick site.
[1737] (B) Chemically synthesized PEgRNAs with RNA and DNA synthesis templates

[1738] Alternative nucleic acid templates can be used within chemically synthesized PEgRNAs (FIG. 72C). For example, a synthetic PEgRNA can be constructed as an RNA/DNA hybrid wherein the spacer sequence and sgRNA scaffold is composed of RNA nucleotides and the primer binding site and synthesis template (shown as a 3′ extension in FIG. 72C) is composed of DNA nucleotides. This could allow for DNA-dependent DNA polymerases to be used in place of reverse transcriptase within prime editors. It could also prevent the synthesis of DNA that is templated by sgRNA scaffold sequence. In other designs, chemical linkers, composed of non-templating nucleotides or other suitable linker moieties, can be used to tether the nucleic acid edit template (composed of RNA or DNA) to the sgRNA scaffold. This could prevent continued DNA polymerization of the sgRNA scaffold and allow for flexibility in the extension that allows for more efficient templated synthesis. Finally, the directionality of the nucleic acid synthesis template can be inverted such that DNA polymerization proceeds away from the sgRNA scaffold as opposed to toward it.

### (C) Recruitment of the DNA Polymerase Expressed in Trans

[1739] In the main embodiment of prime editing, the polymerase (e.g., reverse transcriptase enzyme) is expressed as a fusion to the napDNAbp (e.g., Cas9 nickase). Alternatively, the polymerase (e.g., reverse transcriptase) can be expressed in trans, and its activity can be localized to the editing site using recruitment systems such as the MS2 RNA aptamer and MS2 coat protein, or other similar recruitment system known in the art. In this system, the PEgRNA is modified to include an MS2 aptamer within one of the sgRNA scaffold hairpins, and the polymerase (e.g., reverse transcriptase) is expressed as a fusion protein to MS2cp. The napDNAbp (e.g., Cas9 nickase) is also expressed as an independent polypeptide. This system has been demonstrated with the wild type M-MLV reverse transcriptase (FIG. 74), and should be applicable to other RT variants. In addition, other RNA-protein interactions, or protein-protein interactions, could be used for RT recruitment.

The following sequences are pertinent to Example 19:
Sequences of tPERTs:

### MS2 Aptamer/RT Template/PBS/Linker

### 5′-MS2_13nt-PBS:

(SEQ ID NO: 762)
5′GCCAACATGAGGATCACCCATGTCTGCAGGGCCTGGAGGAAGCAGGG
CTTCCTTTCCTCTGCCATCAATGATGGTGATGATGGTGCGTGCTCAGTC
TG-3′

### 5′-MS2_17nt-PBS:

(SEQ ID NO: 773)
5′GCCAACATGAGGATCACCCATGTCTGCAGGGCCTGGAGGAAGCAGGGC
TTCCTTTCCTCTGCCATCAATGATGGTGATGATGGTGCGTGCTCAGTCTG
GGCC-3′

### 3′-MS2_13nt-PBS:

(SEQ ID NO: 774)
5′GGAGGAAGCAGGGCTTCCTTTCCTCTGCCATCAATGATGGTGATGAT
GGTGCGTGCTCAGTCTGAAATTAACAAATCAAGCCAACATGAGGATCAC
CCATGTCTGCAGGGCC-3′

### 3′-MS2_17nt-PBS:

(SEQ ID NO: 775)
5′GGAGGAAGCAGGGCTTCCTTTCCTCTGCCATCAATGATGGTGATGATG
GTGCGTGCTCAGTCTGGGCCAAATTAACAAATCAAGCCAACATGAGGATC
ACCCATGTCTGCAGGGCC-3′

### Sequences of MS2 PEgRNAs:

### Spacer/MS2 Aptamer/sgRNA Scaffold/RT Template/PBS

### HEK3_MS2_1

(SEQ ID NO: 776)
5′GGCCCAGACTGAGCACGTGAGTTTTAGAGCTAGGCCAACATGAGGATC
ACCCATGTCTGCAGGGCCTAGCAAGTTAAAATAAGGCTAGTCCGTTATCA
ACTTGAAAAAGTGGGACCGAGTCGGTCCTCTGCCATCTCGTGCTCAGT
CT-3′

### HEK3_MS2_2

(SEQ ID NO: 777)
5′GGCCCAGACTGAGCACGTGAGTTTTAGAGCTAGAAATAGCAAGTTAAA
ATAAGGCTAGTCCGTTATCAACTTGGCCAACATGAGGATCACCCATGTCT
GCAGGGCCAAGTGGGACCGAGTCGGTCCTCTGCCATCTCGTGCTCAG
TCT-3′

### Protein Sequences:

MS2cp-PE2
(SEQ ID NO: 778)
MKRTADGSEFESPKKKRKVGSASNFTQFVLVDNGGTGDVTVAPSNFANGVAEWISS
NSRSQAYKVTCSVRQSSAQNRKYTIKVEVPKVATQTVGGEELPVAGWRSYLNMELT
IPIFATNSDCELIVKAMQGLLKDGNPIPSAIAANSGIYSGGSSGGSSGSETPGTSESATP
ESSGGSSGGSSDKKYSIGLDIGTNSVGWAVITDEYKVPSKKFKVLGNTDRHSIKKNLIGALL
FDSGETAEATRLKRTARRRYTRRKNRICYLQEIFSNEMAKVDDSFFHRLEESFLVEEDKKH
ERHPIFGNIVDEVAYHEKYPTIYHLRKKLVDSTDKADLRLIYLALAHMIKFRGHFLIEGDLN
PDNSDVDKLFIQLVQTYNQLFEENPINASGVDAKAILSARLSKSRRLENLIAQLPGEKKNGL
FGNLIALSLGLTPNFKSNFDLAEDAKLQLSKDTYDDDLDNLLAQIGDQYADLFLAAKNLS
DAILLSDILRVNTEITKAPLSASMIKRYDEHHQDLTLLKALVRQQLPEKYKEIFFDQSKNGY
AGYIDGGASQEEFYKFIKPILEKMDGTEELLVKLNREDLLRKQRTFDNGSIPHQIHLGELH
AILRRQEDFYPFLKDNREKIEKILTFRIPYYVGPLARGNSRFAWMTRKSEETITPWNFEEVV
DKGASAQSFIERMTNFDKNLPNEKVLPKHSLLYEYFTVYNELTKVKYVTEGMRKPAFLSG
EQKKAIVDLLFKTNRKVTVKQLKEDYFKKIECFDSVEISGVEDRFNASLGTYHDLLKIIKDK
DFLDNEENEDILEDIVLTLTLFEDREMIEERLKTYAHLFDDKVMKQLKRRRYTGWGRLSR
KLINGIRDKQSGKTILDFLKSDGFANRNFMQLIHDDSLTFKEDIQKAQVSGQGDSLHEHIA
NLAGSPAIKKGILQTVKVVDELVKVMGRHKPENIVIEMARENQTTQKGQKNSRERMKRIE
EGIKELGSQILKEHPVENTQLQNEKLYLYYLQNGRDMYVDQELDINRLSDYDVDAIVPQSF
LKDDSIDNKVLTRSDKNRGKSDNVPSEEVVKKMKNYWRQLLNAKLITQRKFDNLTKAERG
GLSELDKAGFIKRQLVETRQITKHVAQILDSRMNTKYDENDKLIREVKVITLKSKLVSDFRK
DFQFYKVREINNYHHAHDAYLNAVVGTALIKKYPKLESEFVYGDYKVYDVRKMIAKSEQEI
GKATAKYFFYSNIMNFFKTEITLANGEIRKRPLIETNGETGEIVWDKGRDFATVRKVLSMP
QVNIVKKTEVQTGGFSKESILPKRNSDKLIARKKDWDPKKYGGFDSPTVAYSVLVVAKVEK
GKSKKLKSVKELLGITIMERSSFEKNPIDFLEAKGYKEVKKDLIIKLPKYSLFELENGRKRM
LASAGELQKGNELALPSKYVNFLYLASHYEKLKGSPEDNEQKQLFVEQHKHYLDEIIEQIS
EFSKRVILADANLDKVLSAYNKHRDKPIREQAENIIHLFTLTNLGAPAAFKYFDTTIDRKRY
TSTKEVLDATLIHQSITGLYETRIDLSQLGGDSGGSSGGSSGSETPGTSESATPESSGGSSGG
SSTLNIEDEYRLHETSKEPDVSLGSTWLSDFPQAWAETGGMGLAVRQAPLIIPLKATSTPVS
IKQYPMSQEARLGIKPHIQRLLDQGILVPCQSPWNTPLLPVKKPGTNDYRPVQDLREVNK
RVEDIHPTVPNPYNLLSGLPPSHQWYTVLDLKDAFFCLRLHPTSQPLFAFEWRDPEMGIS
GQLTWTRLPQGFKNSPTLFNEALHRDLADFRIQHPDLILLQYVDDLLLAATSELDCQQGT
RALLQTLGNLGYRASAKKAQICQKQVKYLGYLLKEGQRWLTEARKETVMGQPTPKTPRQ
LREFLGKAGFCRLFIPGFAEMAAPLYPLTKPGTLFNWGPDQQKAYQEIKQALLTAPALGL
PDLTKPFELFVDEKQGYAKGVLTQKLGPWRRPVAYLSKKLDPVAAGWPPCLRMVAAIAV
LTKDAGKLTMGQPLVILAPHAVEALVKQPPDRWLSNARMTHYQALLLDTDRVQFGPVVA
LNPATLLPLPEEGLQHNCLDILAEAHGTRPDLTDQPLPDADHTWYTDGSSLLQEGQRKA
GAAVTTETEVIWAKALPAGTSAQRAELIALTQALKMAEGKKLNVYTDSRYAFATAHIHGEIY
RRRGWLTSEGKEIKNKDEILALLKALFLPKRLSIIHCPGHQKGHSAEARGNRMADQAARK
AAITETPDTSTLLIENSSPSGGSKRTADGSEFEPKKKRKV

MS2cp-MMLV-RT
(SEQ ID NO: 779)
MKRTADGSEFESPKKKRKVGSASNFTQFVLVDNGGTGDVTVAPSNFANGV
AEWISSNSRSQAYKVTCSVRQSSAQNRKYTIKVEVPKVATQTVGGEELPV
AGWRSYLNMELTIPIFATNSDCELIVKAMQGLLKDGNPIPSAIAANSGIY
SGGSSGGSSGSETPGTSESATPESSGGSSGGSSTLNIEDEYRLHETSKEP
DVSLGSTWLSDFPQAWAETGGMGLAVRQAPLIIPLKATSTPVSIKQYPMS
QEARLGIKPHIQRLLDQGILVPCQSPWNTPLLPVKKPGTNDYRPVQDLRE
VNKRVEDIHPTVPNPYNLLSGLPPSHQWYTVLDLKDAFFCLRLHPTSQPL
FAFEWRDPEMGISGQLTWTRLPQGFKNSPTLFDEALHRDLADFRIQHPDL
ILLQYVDDLLLAATSELDCQQGTRALLQTLGNLGYRASAKKAQICQKQVK
YLGYLLKEGQRWLTEARKETVMGQPTPKTPRQLREFLGTAGFCRLWIPGF
AEMAAPLYPLTKTGTLFNWGPDQQKAYQEIKQALLTAPALGLPDLTKPFE
LFVDEKQGYAKGVLTQKLGPWRRPVAYLSKKLDPVAAGWPPCLRMVAAIA
VLTKDAGKLTMGQPLVILAPHAVEALVKQPPDRWLSNARMTHYQALLLDT
DRVQFGPVVALNPATLLPLPEEGLQHNCLDILAEAHGTRPDLTDQPLPDA
DHTWYTDGSSLLQEGQRKAGAAVTTETEVIWAKALPAGTSAQRAELIALT
QALKMAEGKKLNVYTDSRYAFATAHIHGEIYRRRGLLTSEGKEIKNKDEI
LALLKALFLPKRLSIIHCPGHQKGHSAEARGNRMADQAARKAAITETPDT
STLLIENSSPSGGSKRTADGSEFEPKKKRKV

MMLV-RT-MS2cp
(SEQ ID NO: 780)
MKRTADGSEFESPKKKRKVTLNIEDEYRLHETSKEPDVSLGSTWLSDFPQ
AWAETGGMGLAVRQAPLIIPLKATSTPVSIKQYPMSQEARLGIKPHIQRL
LDQGILVPCQSPWNTPLLPVKKPGTNDYRPVQDLREVNKRVEDIHPTVPN
PYNLLSGLPPSHQWYTVLDLKDAFFCLRLHPTSQPLFAFEWRDPEMGISG
QLTWTRLPQGFKNSPTLFDEALHRDLADFRIQHPDLILLQYVDDLLLAAT
SELDCQQGTRALLQTLGNLGYRASAKKAQICQKQVKYLGYLLKEGQRWLT
EARKETVMGQPTPKTPRQLREFLGTAGFCRLWIPGFAEMAAPLYPLTKTG
TLFNWGPDQQKAYQEIKQALLTAPALGLPDLTKPFELFVDEKQGYAKGVL
TQKLGPWRRPVAYLSKKLDPVAAGWPPCLRMVAAIAVLTKDAGKLTMGQP
LVILAPHAVEALVKQPPDRWLSNARMTHYQALLLDTDRVQFGPVVALNPA
TLLPLPEEGLQHNCLDILAEAHGTRPDLTDQPLPDADHTWYTDGSSLLQE
GQRKAGAAVTTETEVIWAKALPAGTSAQRAELIALTQALKMAEGKKLNVY
TDSRYAFATAHIHGEIYRRRGLLTSEGKEIKNKDEILALLKALFLPKRLS
IIHCPGHQKGHSAEARGNRMADQAARKAAITETPDTSTLLIENSSPSGGS
SGGSSGSETPGTSESATPESSGGSSGGSSGSASNFTQFVLVDNGGTGDVT
VAPSNFANGVAEWISSNSRSQAYKVTCSVRQSSAQNRKYTIKVEVPKVAT
QTVGGEELPVAGWRSYLNMELTIPIFATNSDCELIVKAMQGLLKDGNPIP
SAIAANSGIYSGGSKRTADGSEFEPKKKRKV

### Example 20. Split-Intein Delivery of Prime Editors

[1747] This Example demonstrates that a prime editor may be split using inteins as a means to deliver the prime editor to cells via separate vectors, wherein each vector encodes a portion of the prime editor fusion protein. This Example is focused on a PE fusion protein comprising the canonical SpCas9 (SEQ ID NO: 18). The split sites for other Cas9 proteins may be the corresponding same site, or may need to be optimized for each different Cas9 protein. In the instant Example, the prime editor was split between residues 1023 and 1024 of SpCas9 (SEQ ID NO: 18). This is referred to as the “1023/1024” split site.

[1748] Prime editors (PEs) exceed the AAV packaging capacity. It was therefore contemplated to split the PE by inserting a trans-splicing Npu intein at S. pyogenes Cas9 residue 1024 in SEQ ID NO: 18, allowing delivery of split-SpPEs as two separate polypeptides, each encoded by one of a dual-AAV system. The split site 1023/1024 was chosen because it (1) allows packaging into two AAVs while accommodating space for guide cassette(s) and minimal regulatory elements, (2) mutation of the native Serine to Cysteine would be relatively conservative, (3) the site is a flexible loop near the periphery of Cas9 which sterically is predicted to allow for spicing to occur, and (4) Cas9 has been successfully altered in this loop by circular permutation (but not previously at this specific split site).

[1749] To determine whether Npu-split prime editors are active, HEK cells were transfected with plasmids encoding split-editors, finding they recapitulate activity of full-length PE3 as analyzed by high-throughput sequencing. Furthermore, the three native Npu amino-terminal residues of C-terminal extein are known to splice most efficiently but differ from those natively flanking Cas9 residue 1024. Replacement of these Cas9 residues with the native Npu residues may alter the activity of prime editor. It was therefore determined whether mutation from the Cas9-native “SEQ” towards the Npu intein “CFN” sequence altered efficiency of prime editing. The “SEQ” residues facilitate prime editing with similar efficiency to full-length, suggesting the intein-split PE halves are able to associate and mediate prime editing. No further increase was seen by mutation towards “CFN”, suggesting that association alone may be sufficient for split-PE activity, as we have previously observed with intein-split base editors.

[1750] Although associated, unspliced editors may be active, perturbations of the sterics of the prime editor resulting from incomplete splicing during initiation steps may affect editing outcomes. 1024-CFN was therefore chosen for further studies as it also recapitulates full-length PE3 activity.

[1751] The following are the amino acid sequences of the 1023/1024 split.

SpPE2 split at 1023/1024 N terminal half
(SEQ ID NO: 3875)
MKRTADGSEFESPKKKRKVDKKYSIGLDIGTNSVGWAVITDEYKVPSKKFKV
LGNTDRHSIKKNLIGALLFDSGETAEATRLKRTARRRYTRRKNRICYLQEIFSNEMAK
VDDSFFHRLEESFLVEEDKKHERHPIFGNIVDEVAYHEKYPTIYHLRKKLVDSTDKAD
LRLIYLALAHMIKFRGHFLIEGDLNPDNSDVDKLFIQLVQTYNQLFEENPINASGVDA
KAILSARLSKSRRLENLIAQLPGEKKNGLFGNLIALSLGLTPNFKSNFDLAEDAKLQLS
KDTYDDDLDNLLAQIGDQYADLFLAAKNLSDAILLSDILRVNTEITKAPLSASMIKRY
DEHHQDLTLLKALVRQQLPEKYKEIFFDQSKNGYAGYIDGGASQEEFYKFIKPILEK
MDGTEELLVKLNREDLLRKQRTFDNGSIPHQIHLGELHAILRRQEDFYPFLKDNREKI
EKILTFRIPYYVGPLARGNSRFAWMTRKSEETITPWNFEEVVDKGASAWSFIERMTNF
DKNLPNEKVLPKHSLLYEYFTVYNELTKVKYVTEGMRKPAFLSGEQKKAIVDLLFK
TNRKVTVKQLKEDYFKKIECFDSVEISGVEDRFNASLGTYHDLLKIIKDKDFLDNEEN
EDILEDIVLTLTLFEDREMIEERLKTYAHLFDDKVMKQLKRRRYTGWGRLSRKLINGI
RDKQSGKTILDFLKSDGFANRNFMQLIHDDSLTFKEDIQKAQVSGQGDSLHEHIANL
AGSPAIKKGILQTVKVVDELVKVMGRHKPENIVIEMARENQTTQKGQKNSRERMKR
IEEGIKELGSQILKEHPVENTQLQNEKLYLYYLQNGRDMYVDQELDINRLSDYDVDA
IVPQSFLKDDSIDNKVLTRSDKNRGKSDNVPSEEVVKKMKVYWRQLLNAKLITQRK
FDNLTKAERGGLSELDKAGFIKRQLVETRQITKHVAQILDSRMNTKYDENDKLIREV
KVITLKSKLVSDFRKDFQFYKVREINNYHHAHDAYLNAVVGTALIKKYPKLESEFVY

[chemical structure]

[chemical structure]

KRTADGSEFEPKKKRKV

[chemical structure]

SpPE2 split at 1023/1024 C terminal half
(SEQ ID NO: 3876)

[chemical structure]

FNEIGKATAKYFFYSNIMNFFKTEITLANGEIRKRPLIETNGETGEIVWDKGRDFATVR
KVLSMPQVNIVKKTEVQTGGFSKESILPKRNSDKLIARKKDWDPKKYGGFDSPTVAY
SVLVVAKVEKGKSKKLKSVKELLGITIMERSSFEKNPIDFLEAKGYKEVKKDLIIKLP
KYSLFELENGRKRMLASAGELQKGNELALPSKYVNFLYLASHYEKLKGSPEDNEQK
QLFVEQHKHYLDEIIEQISEFSKRVILADANLDKVLSAYNKHRDKPIREQAENIIHLFT

[chemical structure]

[chemical structure]

FPQAWAETGGMGLAVRQAPLIIPLKATSTPVSIKQYPMSQEARLGIKPHIQRLL
DQGILVPCQSPWNTPLLPVKKPGTNDYRPVQDLREVNKRVEDIHPTVPNPYNLL
SGLPPSHQWYTVLDLKDAFFCLRLHPTSQPLFAFEWRDPEMGISGQLTWTRLP
QGFKNSPTLFNEALHRDLADFRIQHPDLILLQYVDDLLLAATSELDCQQGTRAL
LQTLGNLGYRASAKKAQICQKQVKYLGYLLKEGQRWLTEARKETVMGQPTPK
TPRQLREFLGKAGFCRLFIPGFAEMAAPLYPLTKPGTLFNWGPDQQKAYQEIK
QALLTAPALGLPDLTKPFELFVDEKQGYAKGVLTQKLGPWRRPVAYLSKKLDP
VAAGWPPCLRMVAAIAVLTKDAGKLTMGQPLVILAPHAVEALVKQPPDRWLS
NARMTHYQALLLDTDRVQFGPVVALNPATLLPLPEEGLQHNCLDILAEAHGTR
PDLTDQPLPDADHTWYTDGSSLLQEGQRKAGAAVTTETEVIWAKALPAGTSAQ
RAELIALTQALKMAEGKKLNVYTDSRYAFATAHIHGEIYRRRGWLTSEGKEIK
NKDEILALLKALFLPKRLSIIHCPGHQKGHSAEARGNRMADQAARKAAITETPD

[chemical structure]

[chemical structure]

### Prime Editor Packages in a Dual AAV System

[1752] Prime editors split between residues 1023 and 1024 with Npu trans-splicing intein become packages within AAV with high titer comparable to that of base editors of similar genome size produced in the same manner.

### Prime Editing In Vivo

[1753] Split SpPE3 delivered with AAV9 by intracerebroventricular injection to P0 mice mediates prime editing in brain tissue in vivo. A nucleotide substitution at position +5 (i.e., 5 nucleotide bases downstream of nick site and within the PAM sequence) of a G-to-T results in the installation of a Pro>Gln coding mutation near the N terminus of DNMT1. This edit demonstrates the viability of prime editing in vivo and is not thought to introduce any selective pressure on edited cells (with “+5” referring to the +5 position downstream of the nick site). The AAV architectures tested include a full-length MMLV RT as well as a truncated variant lacking the RNAse H domain. The truncated post-transcriptional regulatory element W3 was also assessed as it has been shown to increase expression from viral cassettes in vivo but its importance had not been tested in the context of base editors or prime editors. It was found that full-length RT outperforms truncated RT, and the addition of the W3 sequence improves activity. The increase in editing activity when W3 is present indicates that expression of prime editor is limiting in vivo and demonstrates the distinct challenges of prime editing in vivo versus cell culture.

### REFERENCES

[1754] Oakes, B. L., Fellmann, C. et al. CRISPR-Cas9 Circular Permutants as Programmable Scaffolds for Genome Modification. Cell. 2019 Jan. 10; 176(1-2):254-267.e16. doi: 10.1016/j.ce11.2018.11.052.

### Example 21. Linker Optimization in Pe2 Format

[1755] This Example constructed a number of variant prime editors all based on PE2. PE2 has the following sequence and structure:

[1756] As used herein, “PE2” refers to a PE complex comprising a fusion protein comprising Cas9(H840A) and a variant MMLV RT having the following structure: [NLS]-[Cas9(H840A)]-[linkerHMMLV_RT(D200N)(T330P)(L603W)(T306K)(W313F)]+a desired PEgRNA, wherein the PE fusion has the amino acid sequence of SEQ ID NO: 134, which is shown as follows:

(SEQ ID NO: 134)
MKRTADGSEFESPKKKRKVDKKYSIGLDIGTNSVGWAVITDEYKVPSKKF
KVLGNTDRHSIKKNLIGALLFDSGETAEATRLKRTARRRYTRRKNRICYL
QEIFSNEMAKVDDSFFHRLEESFLVEEDKKHERHPIFGNIVDEVAYHEKY
PTIYHLRKKLVDSTDKADLRLIYLALAHMIKFRGHFLIEGDLNPDNSDVD
KLFIQLVQTYNQLFEENPINASGVDAKAILSARLSKSRRLENLIAQLPGE
KKNGLFGNLIALSLGLTPNFKSNFDLAEDAKLQLSKDTYDDDLDNLLAQI
GDQYADLFLAAKNLSDAILLSDILRVNTEITKAPLSASMIKRYDEHHQDL
TLLKALVRQQLPEKYKEIFFDQSKNGYAGYIDGGASQEEFYKFIKPILEK
MDGTEELLVKLNREDLLRKQRTFDNGSIPHQIHLGELHAILRRQEDFYPF
LKDNREKIEKILTFRIPYYVGPLARGNSRFAWMTRKSEETITPWNFEEVV
DKGASAQSFIERMTNFDKNLPNEKVLPKHSLLYEYFTVYNELTKVKYVTE
GMRKPAFLSGEQKKAIVDLLFKTNRKVTVKQLKEDYFKKIECFDSVEISG
VEDRFNASLGTYHDLLKIIKDKDFLDNEENEDILEDIVLTLTLFEDREMI
EERLKTYAHLFDDKVMKQLKRRRYTGWGRLSRKLINGIRDKQSGKTILDF
LKSDGFANRNFMQLIHDDSLTFKEDIQKAQVSGQGDSLHEHIANLAGSPA
IKKGILQTVKVVDELVKVMGRHKPENIVIEMARENQTTQKGQKNSRERMK
RIEEGIKELGSQILKEHPVENTQLQNEKLYLYYLQNGRDMYVDQELDINR
LSDYDVDAIVPQSFLKDDSIDNKVLTRSDKNRGKSDNVPSEEVVKKMKNY
WRQLLNAKLITQRKFDNLTKAERGGLSELDKAGFIKRQLVETRQITKHVA
QILDSRMNTKYDENDKLIREVKVITLKSKLVSDFRKDFQFYKVREINNYH
HAHDAYLNAVVGTALIKKYPKLESEFVYGDYKVYDVRKMIAKSEQEIGKA
TAKYFFYSNIMNFFKTEITLANGEIRKRPLIETNGETGEIVWDKGRDFAT
VRKVLSMPQVNIVKKTEVQTGGFSKESILPKRNSDKLIARKKDWDPKKYG
GFDSPTVAYSVLVVAKVEKGKSKKLKSVKELLGITIMERSSFEKNPIDFL
EAKGYKEVKKDLIIKLPKYSLFELENGRKRMLASAGELQKGNELALPSKY
VNFLYLASHYEKLKGSPEDNEQKQLFVEQHKEIYLDEHEQISEFSKRVIL
ADANLDKVLSAYNKHRDKPIREQAENIIHLFTLTNLGAPAAFKYFDTTID
RKRYTSTKEVLDATLIHQSITGLYETRIDLSQLGGDSGGSSGGSSGSETP
GTSESATPESSGGSSGGSSTLNIEDEYRLHETSKEPDVSLGSTWLSDEPQ
AWAETGGMGLAVRQAPLIIPLKATSTPVSIKQYPMSQEARLGIKPHIQRL
LDQGILVPCQSPWNTPLLPVKKPGTNDYRPVQDLREVNKRVEDIHPTVPN
PYNLLSGLPPSHQWYTVLDLKDAFFCLRLHPTSQPLFAFEWRDPEMGISG
QLTWTRLPQGFKNSPTLFNEALHRDLADFRIQHPDLILLQYVDDLLLAAT
SELDCQQGTRALLQTLGNLGYRASAKKAQICQKQVKYLGYLLKEGQRWLT
EARKETVMGQPTPKTPRQLREFLGKAGFCRLFIPGFAEMAAPLYPLTKPG
TLFNWGPDQQKAYQEIKQALLTAPALGLPDLTKPFELFVDEKQGYAKGVL
TQKLGPWRRPVAYLSKKLDPVAAGWPPCLRMVAAIAVLTKDAGKLTMGQP
LVILAPHAVEALVKQPPDRWLSNARMTHYQALLLDTDRVQFGPVVALNPA
TLLPLPEEGLQHNCLDILAEAHGTRPDLTDQPLPDADHTWYTDGSSLLQE
GQRKAGAAVTTETEVIWAKALPAGTSAQRAELIALTQALKMAEGKKLNVY
TDSRYAFATAHIHGEIYRRRGWLTSEGKEIKNKDEILALLKALFLPKRLS
IIHCPGHQKGHSAEARGNRMADQAARKAAITETPDTSTLLIENSSPSGGS
KRTADGSEFEPKKKRKV
KEY:
NUCLEAR LOCALIZATION SEQUENCE (NLS)
TOP:(SEQ ID NO: 124),
BOTTOM: (SEQ ID NO: 133)
CAS9(H840A) (SEQ ID NO: 137)
33-AMINO ACID LINKER (SEQ ID NO: 127)
M-MLV reverse transcriptase (SEQ ID NO: 139).

[1757] The PE2 linker is SGGSSGGSSGSETPGTSESATPESSGGSSGGSS (SEQ ID NO: 127).

[1758] In this experiment, the linker of PE2 was replaced with one of the following substitute linkers (or no linker in one instance):

| Linker | | |
|---|---|---|
| Name | Nucleotide Sequence | Amino Acid Sequence |
| 1x SGGS | TCCGGAGGATCT (SEQ ID NO: 3880) | SGGS (SEQ ID NO: 174) |
| 2x SGGS | TCCGGAGGATCTAGCGGAGGCTCC | SGGSSGGS (SEQ ID NO: 446) |
| | (SEQ ID NO: 3881) | |
| 3x SGGS | TCCGGAGGATCTAGCGGAGGCTCCA | SGGSSGGSSGGS (SEQ ID NO: |
| | GCGGAGGCAGC (SEQ ID NO: 3882) | 3889) |
| 1x XTEN | TCTGGCTCTGAGACACCTGGCACAAG | SGSETPGTSESATPES (SEQ ID |
| | CGAGAGCGCAACACCTGAAAGC | NO: 171) |
| | (SEQ ID NO: 3883) | |
| No linker | | |
| 1x Gly | GGT | G |
| 1x Pro | CCC | P |
| 1x | GAAGCAGCTGCTAAA (SEQ ID NO: | EAAAK (SEQ ID NO: 3968) |
| EAAAK | 3884) | |
| 2x | GAAGCCGCTGCTAAAGAAGCTGCAG | EAAAKEAAAK (SEQ ID NO: |
| EAAAK | CTAAG (SEQ ID NO: 3885) | 3969) |
| 3x | GAAGCCGCTGCTAAAGAGGCCGCTG | EAAAKEAAAKEAAAK (SEQ ID |
| EAAAK | CTAAAGAAGCTGCAGCTAAG | (SEQ ID NO: 3970) |
| | NO: 3886) | |

[1759] FIG. 79 shows the editing efficiency of the replacement linker constructs. In particular, the data shows the editing efficiency of the PE2 construct with the current linker (noted as PE2—white box) compared to various versions with the linker replaced with a sequence as indicated at the HEK3, EMX1, FANCF, RNF2 loci for representative PEgRNAs for transition, transversion, insertion, and deletion edits. The replacement linkers are referred to as “1× SGGS”(SEQ ID NO:174), “2× SGGS”(SEQ ID NO: 446), “3× SGGS”(SEQ ID NO: 3889), “1× XTEN”(SEQ ID NO: 171), “no linker”, “1× Gly”, “1× Pro”, “1× EAAAK”(SEQ ID NO: 3968), “2× EAAAK” (SEQ ID NO: 3969), and “3× EAAAK” (SEQ ID NO: 3970). The editing efficiency is measured in bar graph format relative to the “control” editing efficiently of PE2. The linker of PE2 is SGGSSGGSSGSETPGTSESATPESSGGSSGGSS (SEQ ID NO: 127). All editing was done in the context of the PE3 system, i.e., which refers the PE2 editing construct plus the addition of the optimal secondary sgRNA nicking guide.

[1760] FIG. 80. shows that the 1× XTEN (SEQ ID NO: 171) linker provided an increase in editing efficiency. Taking the average fold efficacy relative to PE2 yields the graph shown, indicating that use of a 1× XTEN (SEQ ID NO: 171) linker sequence improves editing efficiency by 1.14 fold on average (n=15).

### Example 22. Prime Editor Guide RNAs with Improved Activities

[1761] In various embodiments, PEgRNA are likely to be target DNA site and edit dependent. That is, the sequence of the PEgRNA will depend upon the target DNA sequence and the particular edit that is being introduced therein by prime editing (e.g., deletion, insertion, inversion, substitution). For instance, in certain embodiments, when attaching a motif 3′ of the primer binding site (PBS) of the PEgRNA, a linker between the PBS and motif is preferred to prevent steric clash with the polymerase domain (e.g., reverse transcriptase) of the PE fusion protein. However, the nature of that linker may be different for each site. For instance, if the same linker for each site were used, it could artificially render a 13 nt PBS a 16 nt PBS by fortuitous pairing to the spacer sequence. Similarly, the linker could basepair to the PBS itself, resulting in its occlusion and potentially reducing activity. So, unlike with protein-based editors, such as PE or BE4, a single linker sequence option connecting two elements may not be effective in each construct but will depend in part on the sequence of the target DNA sequence and the edit of interest.

[1762] Building, in part, on the information presented Example 15 (Design and Engineering of PEgRNAs), this Example constructed and then tested the effects of various structural modifications made to PEgRNA on editing function, among other aspects.

Expression of PEgRNAs from Non-Pol III Promoters

[1763] A variety of PEgRNA expression systems were tested for their ability to generate PEgRNAs, using insertion of a 102 nucleotide sequence from FKBP as a readout.

[1764] Transcription of PEgRNA can be directed by a typical constitutive promoter, such as U6 promoter. Although the U6 promoter is in most cases effective at directing transcription of PEgRNAs, the U6 promoter is not very effective at directing the transcription of longer PEgRNAs or U-rich RNAs. U-rich RNA stretches of cause premature termination of transcription. This Example compared editing outcomes of guides expressed from the CMV promoter or U1 promoter with the U6 promoter. These promoters require a different terminator sequence, such as MASC ENE or PAN ENE, as provided below. An increase in editing was observed with the pCMV/MASC-ENE system, however these guides resulted in incomplete insertion of the sequence, while, with the U6 promoter, complete insertion was observed at lower levels of editing. See FIG. 81. The data suggests the likelihood that the alternate expression systems may be useful for long insertions.

[1765] The nucleotide sequence of the pCMV/MASC-ENE expression systems as follows (5′-to-3′ direction) (with the name of the motif in bold immediately preceding the region to which it refers):

(SEQ ID NO: 3971)
-pCMV promoter-
TAGTTATTAATAGTAATCAATTACGGGGTCATTAGTTCATAGCCCATATATGGAG
TTCCGCGTTACATAACTTACGGTAAATGGCCCGCCTGGCTGACCGCCCAACGACC
CCCGCCCATTGACGTCAATAATGACGTATGTTCCCATAGTAACGCCAATAGGGAC
TTTCCATTGACGTCAATGGGTGGAGTATTTACGGTAAACTGCCCACTTGGCAGTA
CATCAAGTGTATCATATGCCAAGTACGCCCCCTATTGACGTCAATGACGGTAAAT
GGCCCGCCTGGCATTATGCCCAGTACATGACCTTATGGGACTTTCCTACTTGGCA
GTACATCTACGTATTAGTCATCGCTATTACCATGGTGATGCGGTTTTGGCAGTAC
ATCAATGGGCGTGGATAGCGGTTTGACTCACGGGGATTTCCAAGTCTCCACCCCA
TTGACGTCAATGGGAGTTTGTTTTGGCACCAAAATCAACGGGACTTTCCAAAATG
TCGTAACAACTCCGCCCCATTGACGCAAATGGGCGGTAGGCGTGTACGGTGGGA
GGTCTATATAAGCAGAGCTGGTTTAGTGAACCGTCAGATC-Csy4 loop-
GTTCACTGCCGTATAGGCAG-spacer-GGCCCAGACTGAGCACGTGA-scaffold-
GTTTTAGAGCTAGAAATAGCAAGTTAAAATAAGGCTAGTCCGTTATCAACTTGAA
AAAGTGGGACCGAGTCGGTCC-template-
TGGAGGAAGCAGGGCTTCCTTTCCTCTGCCATCA-insert-
AAATTTCTTTCCATCTTCAAGCATCCCGGTGTAGTGCACCACGCAGGTCTGGCCG
CGCTTGGGGAAGGTGCGCCCGTCTCCTGGGGAGATGGTTTCCACCTGCACTCC-
PBS-CGTGCTCAGTCTG-linker-TTT-MASC ENE-
TAGGGTCATGAAGGTTTTTCTTTTCCTGAGAAAACAACACGTATTGTTTTCTCAGG
TTTTGCTTTTTGGCCTTTTTCTAGCTTAAAAAAAAAAAAAGCAAAAGATGCTGGT
GGTTGGCACTCCTGGTTTCCAGGACGGGGTTCAAATCCCTGCGGCGTCTTTGCTTT
GACT-unrelated plasmid sequence-
TTTTTTTAAGCTTGGGCCGCTCGAGGTAGCAGC-Ubc promoter-
GGCCTCCGCGCCGGGTTTTGGCGCCTCCCGCGGGCGCCCCCCTCCTCACGGCGAG
CGCTGCCACGTCAGACGAAGGGCGCAGGAGCGTTCCTGATCCTTCCGCCCGGAC
GCTCAGGACAGCGGCCCGCTGCTCATAAGACTCGGCCTTAGAACCCCAGTATCA
GCAGAAGGACATTTTAGGACGGGACTTGGGTGACTCTAGGGCACTGGTTTTCTTT
CCAGAGAGCGGAACAGGCGAGGAAAAGTAGTCCCTTCTCGGCGATTCTGCGGAG
GGATCTCCGTGGGGCGGTGAACGCCGATGATTATATAAGGACGCGCCGGGTGTG
GCACAGCTAGTTCCGTCGCAGCCGGGATTTGGGTCGCGGTTCTTGTTTGTGGATC
GCTGTGATCGTCACTTGGTGAGTTGCGGGCTGCTGGGCTGGCCGGGGCTTTCGTG
GCCGCCGGGCCGCTCGGTGGGACGGAAGCGTGTGGAGAGACCGCCAAGGGCTGT
AGTCTGGGTCCGCGAGCAAGGTTGCCCTGAACTGGGGGTTGGGGGGAGCGCACA
AAATGGCGGCTGTTCCCGAGTCTTGAATGGAAGACGCTTGTAAGGCGGGCTGTG
AGGTCGTTGAAACAAGGTGGGGGGCATGGTGGGCGGCAAGAACCCAAGGTCTTG
AGGCCTTCGCTAATGCGGGAAAGCTCTTATTCGGGTGAGATGGGCTGGGGCACC
ATCTGGGGACCCTGACGTGAAGTTTGTCACTGACTGGAGAACTCGGGTTTGTCGT
CTGGTTGCGGGGGCGGCAGTTATGCGGTGCCGTTGGGCAGTGCACCCGTACCTTT
GGGAGCGCGCGCCTCGTCGTGTCGTGACGTCACCCGTTCTGTTGGCTTATAATGC
AGGGTGGGGCCACCTGCCGGTAGGTGTGCGGTAGGCTTTTCTCCGTCGCAGGACG
CAGGGTTCGGGCCTAGGGTAGGCTCTCCTGAATCGACAGGCGCCGGACCTCTGGT
GAGGGGAGGGATAAGTGAGGCGTCAGTTTCTTTGGTCGGTTTTATGTACCTATCT
TCTTAAGTAGCTGAAGCTCCGGTTTTGAACTATGCGCTCGGGGTTGGCGAGTGTG
TTTTGTGAAGTTTTTTAGGCACCTTTTGAAATGTAATCATTTGGGTCAATATGTAA
TTTTCAGTGTTAGACTAGTAAATTGTCCGCTAAATTCTGGCCGTTTTTGGCTTTTT
TGTTAGACAGGATCCCCGGGTACCGGTCGCCACC-Csy4 and NLS-
ATGGGCTCTTTTACTATGGACCACTACCTGGATATTAGACTGAGACCTGACCCTG
AGTTCCCACCCGCCCAGCTGATGAGCGTGCTGTTCGGCAAGCTGCACCAGGCCCT
GGTGGCACAGGGAGGCGACCGGATCGGCGTGAGCTTCCCCGACCTGGATGAGAG
CAGATCCAGGCTGGGAGAGCGCCTGAGGATCCACGCATCCGCCGACGATCTGCG
CGCCCTGCTGGCCCGGCCATGGCTGGAGGGCCTGCGCGACCACCTGCAGTTTGG
AGAGCCAGCAGTGGTGCCACACCCTACCCCATACAGGCAGGTGTCCAGGGTGCA
GGCAAAGTCTAACCCTGAGCGGCTGCGGAGAAGGCTGATGCGCCGGCACGATCT
GTCTGAGGAGGAGGCCAGAAAGAGGATCCCCGACACCGTGGCCAGAACACTGG
ATCTGCCTTTCGTGACCCTGCGGAGCCAGAGCACAGGCCAGCACTTCAGACTGTT
TATCAGGCACGGCCCACTGCAGGTGACAGCCGAGGAAGGAGGATTCACTTGTTA
CGGACTGTCTAAAGGAGGATTCGTGCCCTGGTTCAGCAGCCTGAGGCCTCCTAAG
AAGAAGAGGAAGGTTTAA-SV40 terminator-
TGATCATAATCAAGCCATATCACATCTGTAGAGGTTTACTTGCTTTAAAAAACCT
CCACACCTCCCCCTGAACCTGAAACATAAAATGAATGCAATTGTTGTTGTTAACT
TGTTTATTGCAGCTTATAATGGTTACAAATAAAGCAATAGCATCACAAATTTCAC
AAATAAAGCATTTTTTTCACTGCATTCTAGTTGTGGTTTGTCCAAACTCATCAATG
TATCTTATCATGTCTGGATCTGC
Key:
[pCMV promoter]-binds pol II RNA polymerase
[Csy4 loop]-bound by Csy4 protein, results
in cleavage 3′ of the loop. Required because part of
[CMV promoter] is transcribed, and if this sequence is
attached 5′ of the gRNA it will lower/eliminate activity
(previously known).
[Spacer sequence] of pegRNA
[pegRNA scaffold]
[DNA synthesis template]
[insertion edit (108 nt from FKBP)]
[primer binding site]
[Linker](highly variable)-connects PBS and terminator
element
[MASC ENE transcription terminator]-transcription of
this element results in termination of transcription;
a polyA tail is encoded and then sequestered by the
ENE element
[Unimportant sequence]
[Ubc promoter]-required for expression of the Csy4
protein
[Csy4 protein and NLS]-required for processing of the
5′ end of the guide. Other strategies could also be
used that don't require expression of a large protein
(such as ribozyme-mediated cleavage of the spacer), but
these would require more individual tuning for different
spacer sequences, so we used this.
[SV40 terminator]-for termination of the Csy4 protein.

### Improvements to the PEgRNA Scaffold

[1766] A number of structural modifications to the gRNA scaffold were also tested, none of which showed a significant increase in editing activity (see FIG. 82 at 3.30.13 through 3.30.19 inin the X axis, as compare to 3.30). However, this data has two caveats worth noting. First, this guide already worked quite well, and a less effective guide would have been better to test. Second, in HEK cells, transfection is quite efficient, and it was noted that the amount of guide RNA transfected is in large excess compared to what is needed (reducing the amount by ˜4-8 fold has no effect on editing). These improvements might only be seen in other cell types, where transfection efficiency is lower, or with less effective guides. Many of these changes are precedented to improve sgRNA activity in other cell lines.

[1767] The sequences of the constructs of FIG. 82 are as follows:

HEK3.30 pegRNA sequence:
[SEQ ID NO: 3972]
spacer-GGCCCAGACUGAGCACGUGA-scaffold-
GUUUUAGAGCUAGAAAUAGCAAGUUAAAAUAAGGCUAGUCCGUUAUCAACU
UGAAAAAGUGGCACCGAGUCGGUGC-Template and PBS-
UCUGCCAUCAAAGCGUGCUCAGUCUG-Terminal motif-UUUU
HEK3.30.0 pegRNA sequence:
[SEQ ID NO: 3874]
spacer-GGCCCAGACUGAGCACGUGA-scaffold-
GUUUUAGAGCUAGAAAUAGCAAGUUAAAAUAAGGCUAGUCCGUUAUCAACU
UGAAAAAGUGGCACCGAGUCGGUGC-Template and PBS-
UCUGCCAUCAAAGCGUGCUCAGUCUG-Terminal motif-UUUUUU
HEK3.30.1 pegRNA sequence:
[SEQ ID NO: 3973]
spacer-GGCCCAGACUGAGCACGUGA-scaffold-
GUUUUAGAGCUAGAAAUAGCAAGUUAAAAUAAGGCUAGUCCGUUAUCAACU
UGAAAAAGUGGCACCGAGUCGGUGC-Template and PBS-
UCUGCCAUCAAAGCGUGCUCAGUCUG-Terminal motif-[none]
HEK3.30.2 pegRNA sequence:
[SEQ ID NO: 3974]
spacer-GGCCCAGACUGAGCACGUGA-scaffold-
GUUUUAGAGCUAGAAAUAGCAAGUUAAAAUAAGGCUAGUCCGUUAUCAACU
UGAAAAAGUGGCACCGAGUCGGUGC-Template and PBS-
UCUGCCAUCAAAGCGUGCUCAGUCUG-Terminal motif-
UUUGCUCGAGGCGGAAACGCCUCGAGCUUUU
HEK3.30.2b pegRNA sequence:
[SEQ ID NO: 3975]
spacer-GGCCCAGACUGAGCACGUGA-scaffold-
GUUUUAGAGCUAGAAAUAGCAAGUUAAAAUAAGGCUAGUCCGUUAUCAACU
UGAAAAAGUGGCACCGAGUCGGUGC-Template and PBS-
UCUGCCAUCAAAGCGUGCUCAGUCUG-Terminal motif-
UUUGCUCGAGGCGGAAACGCCUCGAGC
HEK3.30.3 pegRNA sequence:
[SEQ ID NO: 3976]
spacer-GGCCCAGACUGAGCACGUGA-scaffold-
GUUUUAGAGCUAGAAAUAGCAAGUUAAAAUAAGGCUAGUCCGUUAUCAACU
UGAAAAAGUGGCACCGAGUCGGUGC-Template and PBS-
UCUGCCAUCAAAGCGUGCUCAGUCUG-Terminal motif-
UUUGCUCGAGGCGUACGCGAAAGCGUACGCCUCGAGCUUUU
HEK3.30.3b pegRNA sequence:
[SEQ ID NO: 3977]
spacer-GGCCCAGACUGAGCACGUGA-scaffold-
GUUUUAGAGCUAGAAAUAGCAAGUUAAAAUAAGGCUAGUCCGUUAUCAACU
UGAAAAAGUGGCACCGAGUCGGUGC-Template and PBS-
UCUGCCAUCAAAGCGUGCUCAGUCUG-Terminal motif-
UUUGCUCGAGGCGUACGCGAAAGCGUACGCCUCGAGC
HEK3.30.5 pegRNA sequence:
[SEQ ID NO: 3978]
spacer-GGCCCAGACUGAGCACGUGA-scaffold-
GUUUUAGAGCUAGAAAUAGCAAGUUAAAAUAAGGCUAGUCCGUUAUCAACU
UGAAAAAGUGGCACCGAGUCGGUGC-Template and PBS-
UCUGCCAUCAAAGCGUGCUCAGUCUG-Terminal motif-
UUUGCUCGAGGCGUACGCCCGAUGAAAAUCGGGCGUACGCCUCGAGCUUUU
HEK3.30.5a pegRNA sequence:
[SEQ ID NO: 3979]
spacer-GGCCCAGACUGAGCACGUGA-scaffold-
GUUUUAGAGCUAGAAAUAGCAAGUUAAAAUAAGGCUAGUCCGUUAUCAACU
UGAAAAAGUGGCACCGAGUCGGUGC-Template and PBS-
UCUGCCAUCAAAGCGUGCUCAGUCUG-Terminal motif-
UUUUGGGGUUGGGGUUGGGGUUGGGGUUUU
HEK3.30.5b pegRNA sequence:
[SEQ ID NO: 3980]
spacer-GGCCCAGACUGAGCACGUGA-scaffold-
GUUUUAGAGCUAGAAAUAGCAAGUUAAAAUAAGGCUAGUCCGUUAUCAACU
UGAAAAAGUGGCACCGAGUCGGUGC-Template and PBS-
UCUGCCAUCAAAGCGUGCUCAGUCUG-Terminal motif-
UUUGGUGGUGGUGGUUUU
HEK3.30.13 pegRNA sequence:
[SEQ ID NO: 3981]
spacer-GGCCCAGACUGAGCACGUGA-scaffold-
GUUUUAGAGCUAGCGAAAGCUAGCAAGUUAAAAUAAGGCUAGUCCGUUAUC
AACUUGAAAAAGUGGGACCGAGUCGGUCC-Template and PBS-
UCUGCCAUCAAAGCGUGCUCAGUCUG-Terminal motif-UUUU
HEK3.30.15 pegRNA sequence:
[SEQ ID NO: 3982]
spacer-GGCCCAGACUGAGCACGUGA-scaffold-
GUUUUAGAGCUAGCUCGAAAGAGCUAGCAAGUUAAAAUAAGGCUAGUCCGU
UAUCAACUUGAAAAAGUGGGACCGAGUCGGUCC-Template and PBS-
UCUGCCAUCAAAGCGUGCUCAGUCUG-Terminal motif-UUUU
HEK3.30.15 pegRNA sequence:
[SEQ ID NO: 3983]
spacer-GGCCCAGACUGAGCACGUGA-scaffold-
GUUUUAGAGCUAGCUCAUGAAAAUGAGCUAGCAAGUUAAAAUAAGGCUAGU
CCGUUAUCAACUUGAAAAAGUGGGACCGAGUCGGUCC-Template and PBS-
UCUGCCAUCAAAGCGUGCUCAGUCUG-Terminal motif-UUUU
HEK3.30.16 pegRNA sequence:
[SEQ ID NO: 3984]
spacer-GGCCCAGACUGAGCACGUGA-scaffold-
GUUUUAGAGCUAGCUCAUCCGAAAGGAUGAGCUAGCAAGUUAAAAUAAGGC
UAGUCCGUUAUCAACUUGAAAAAGUGGGACCGAGUCGGUCC-Template and
PBS-UCUGCCAUCAAAGCGUGCUCAGUCUG-Terminal motif-UUUU
HEK3.30.17 pegRNA sequence:
[SEQ ID NO: 3985]
spacer-GGCCCAGACUGAGCACGUGA-scaffold-
GUUUUAGAGCUAGCUCAUCCUGGAAACAGGAUGAGCUAGCAAGUUAAAAUA
AGGCUAGUCCGUUAUCAACUUGAAAAAGUGGGACCGAGUCGGUCC-Template
and PBS-UCUGCCAUCAAAGCGUGCUCAGUCUG-Terminal motif-UUUU
HEK3.30.18 pegRNA sequence:
[SEQ ID NO: 3986]
spacer-GGCCCAGACUGAGCACGUGA-scaffold-
GUUUGAGAGCUAGAAAUAGCAAGUUUAAAUAAGGCUAGUCCGUUAUCAACU
UGAAAAAGUGGGACCGAGUCGGUCC-Template and PBS-
UCUGCCAUCAAAGCGUGCUCAGUCUG-Terminal motif-UUUU
HEK3.30.19 pegRNA sequence:
[SEQ ID NO: 3987]
spacer-GGCCCAGACUGAGCACGUGA-scaffold-
GUUUGAGAGCUAGCUCAUGAAAAUGAGCUAGCAAGUUUAAAUAAGGCUAGU
CCGUUAUCAACUUGAAAAAGUGGGACCGAGUCGGUCC-Template and PBS-
UCUGCCAUCAAAGCGUGCUCAGUCUG-Terminal motif-UUUU
HEK3.56 pegRNA sequence:
[SEQ ID NO: 3890]
spacer-GGCCCAGACUGAGCACGUGA-scaffold-
GUUUUAGAGCUAGAAAUAGCAAGUUAAAAUAAGGCUAGUCCGUUAUCAACU
UGAAAAAGUGGCACCGAGUCGGUGC-Template and PBS-
UCUGCCAUCAAAGCUUCGACCGUGCUCAGUCUG-Terminal motif-UUUU
HEK3.56.1a pegRNA sequence:
[SEQ ID NO: 3891]
spacer-GGCCCAGACUGAGCACGUGA-scaffold-
GUUUUAGAGCUAGAAAUAGCAAGUUAAAAUAAGGCUAGUCCGUUAUCAACU
UGAAAAAGUGGCACCGAGUCGGUGC-Template and PBS-
UCUGCCAUCAGGCGAAAGCCUCGUGCUCAGUCUG-Terminal motif-UUUU
HEK3.56.1b pegRNA sequence:
[SEQ ID NO: 3988]
spacer-GGCCCAGACUGAGCACGUGA-scaffold-
GUUUUAGAGCUAGAAAUAGCAAGUUAAAAUAAGGCUAGUCCGUUAUCAACU
UGAAAAAGUGGCACCGAGUCGGUGC-Template and PBS-
UCUGCCAUCAGACGAAAGCCUCGUGCUCAGUCUG-Terminal motif-UUUU
HEK3.56.1c pegRNA sequence:
[SEQ ID NO: 3892]
spacer-GGCCCAGACUGAGCACGUGA-scaffold-
GUUUUAGAGCUAGAAAUAGCAAGUUAAAAUAAGGCUAGUCCGUUAUCAACU
UGAAAAAGUGGCACCGAGUCGGUGC-Template and PBS-
UCUGCCAUCAGGCGAAAGCCCGUGCUCAGUCUG-Terminal motif-UUUU
HEK3.56.2a pegRNA sequence:
[SEQ ID NO: 3893]
spacer-GGCCCAGACUGAGCACGUGA-scaffold-
GUUUUAGAGCUAGAAAUAGCAAGUUAAAAUAAGGCUAGUCCGUUAUCAACU
UGAAAAAGUGGCACCGAGUCGGUGC-Template and PBS-
UCUGCCAUCAGAUGCGAAAGCAUCUCGUGCUCAGUCUG-Terminal motif-UUUU
HEK3.56.2b pegRNA sequence:
[SEQ ID NO: 3894]
spacer-GGCCCAGACUGAGCACGUGA-scaffold-
GUUUUAGAGCUAGAAAUAGCAAGUUAAAAUAAGGCUAGUCCGUUAUCAACU
UGAAAAAGUGGCACCGAGUCGGUGC-Template and PBS-
UCUGCCAUCAGAUGCGAAAGCACCUCGUGCUCAGUCUG-Terminal motif-UUUU
HEK3.56.2c pegRNA sequence:
[SEQ ID NO: 3895]
spacer-GGCCCAGACUGAGCACGUGA-scaffold-
GUUUUAGAGCUAGAAAUAGCAAGUUAAAAUAAGGCUAGUCCGUUAUCAACU
UGAAAAAGUGGCACCGAGUCGGUGC-Template and PBS-
UCUGCCAUCAGAUGCGAAAGCAUCCGUGCUCAGUCUG-Terminal motif-UUUU
HEK3.56.3a pegRNA sequence:
[SEQ ID NO: 3896]
spacer-GGCCCAGACUGAGCACGUGA-scaffold-
GUUUUAGAGCUAGAAAUAGCAAGUUAAAAUAAGGCUAGUCCGUUAUCAACU
UGAAAAAGUGGCACCGAGUCGGUGC-Template and PBS-
UCUGCCAUCAGACAUGCGAAAGCAUGUCUCGUGCUCAGUCUG-Terminal motif-
UUUU
HEK3.56.3b pegRNA sequence:
[SEQ ID NO: 3897]
spacer-GGCCCAGACUGAGCACGUGA-scaffold-
GUUUUAGAGCUAGAAAUAGCAAGUUAAAAUAAGGCUAGUCCGUUAUCAACU
UGAAAAAGUGGCACCGAGUCGGUGC-Template and PBS-
UCUGCCAUCAGACAUGCGAAAGCAGGCCCGUGCUCAGUCUG-Terminal motif-
UUUU
HEK3.56.3c pegRNA sequence:
[SEQ ID NO: 3898]
spacer-GGCCCAGACUGAGCACGUGA-scaffold-
GUUUUAGAGCUAGAAAUAGCAAGUUAAAAUAAGGCUAGUCCGUUAUCAACU
UGAAAAAGUGGCACCGAGUCGGUGC-Template and PBS-
UCUGCCAUCAGACAUGCGAAAGCAUGUCUCGUGCUCAGUCUG-Terminal motif-
UUUU
HEK3.56.4a pegRNA sequence:
[SEQ ID NO: 3899]
spacer-GGCCCAGACUGAGCACGUGA-scaffold-
GUUUUAGAGCUAUACGUAGCAAGUUAAAAUAAGGCUAGUCCGUUAUCAACU
UUACGAAGUGGGACCGAGUCGGUCC-Template and PBS-
UCUGCCAUCAAAGCUUCGACCGUGCUCAGUCUG-Terminal motif-UUUU
HEK3.56.4b pegRNA sequence:
[SEQ ID NO: 3989]
5′motif-
GCAGACCUAAGUGGUGACAUAUGGUCUG-spacer-
GGCCCAGACUGAGCACGUGA-scaffold-
GUUUUAGAGCUAUACGUAGCAAGUUAAAAUAAGGCUAGUCCGUUAUCAACU
UUACGAAGUGGGACCGAGUCGGUCC-Template and PBS--Terminal motif-UUUU
HEK3.56.4c pegRNA sequence:
[SEQ ID NO: 3900]
5′motif-
GCAGACCUAAGUGGUGACAUAUGGUCUG-spacer-
GGCCCAGACUGAGCACGUGA-scaffold-
GUUUUAGAGCUAUACGUAGCAAGUUAAAAUAAGGCUAGUCCGUUAUCAACU
UUACGAAGUGGGACCGAGUCGGUCC-Template and PBS--Terminal motif-UUUU
HEK3.56.4d pegRNA sequence:
[SEQ ID NO: 3901]
5′motif-
GCAGACCUAAGUGGUGACAUAUGGUCUG-spacer-
GGCCCAGACUGAGCACGUGA-scaffold-
GUUUUAGAGCUAUACGUAGCAAGUUAAAAUAAGGCUAGUCCGUUAUCAACU
UUACGAAGUGGGACCGAGUCGGUCC-Template and PBS--Terminal motif-UUUU

[1768] Note that where ever either no terminal motif or a terminal motif that does not end in a run of U's exists, transcript was terminated using the following HDV ribozyme:

[SEQ ID NO: 3990]
GGCCGGCAUGGUCCCAGCCUCCUCGCUGGCGCCGGCUGGGCAACAUGCUU
CGGCAUGGCGAAUGGGAC

### Additional RNA Motifs

[1769] See FIG. 82 for details on certain motifs, such as an HDV ribozyme 3′ of the PEgRNA, or G-quadruplex insertion, P1 extensions, template hairpins, and tetraloop circ'd, that may be introduced into a PEgRNA to improve its performance.

[1770] In particular, this Example tested the effect of intalling a tRNA motif 3′ of the primer binding site. This element was chosen because of multiple potential functions:
[1771] (1) the tRNA motif is a very stable RNA motif, and so could potentially reduce PEgRNA degradation;
[1772] (2) the MMLV RT uses a prolyl-tRNA as a primer when converting the viral genome into DNA during transcription, so it was suspected the same cap could be bound by the RT, improving binding of the PEgRNA by PE, RNA stability, and bringing the PBS back in closer proximity to the genomic site, potentially also improving activity.

[1773] In these constructs, the P1 of the tRNA (see FIG. 84) was extended. P1 refers to the first stem/base-pairing element of the tRNA (see FIG. 84). This was believed to be necessary to prevent RNAseP-mediated cleavage of the tRNA 5′ of the P1, which would result in its removal from the PEgRNA.

[1774] In this design a prolyl-tRNA (codon CGG) with an extended P1 and short 3 nt linker between the tRNA and the PBS was used. A variety of tRNA designs were tested and the editign efficiency was tested compared to a PEgRNA having no tRNA cap—see the comparative data in FIG. 83 (depicting a PE experiment that targeted editing of the HEK3 gene, specifically targeting the insertion of a 10 nt insertion at position +1 relative to the nick site and using PE3), FIG. 85 (depicting a PE experiment that targeted editing of the FANCF gene, specifically targeting a G-to-T conversion at position +5 relative to the nick site and using PE3 construct) and FIG. 86 (depicting a PE experiment that targeted editing of the HEK3 gene, specifically targeting the insertion of a 71 nt FLAG tag insertion at position +1 relative to the nick site and using PE3 construct). tRNA-modified PEgRNAs were tested against a non-modified PEgRNA control.

[1775] UGG/CGG refers to the codon used, the number refers to the length of the added P1 extension, long indicates an 8 nt linker, no designation a 3 nt linker.

[1776] The data suggest that the installation of a tRNA may enable use of shorter PBSs, which would likely result in additional activity improvements. In the case of RNF2, it is possible/likely that the linker used resulted in improved PBS binding to the spacer, and the resulting diminishment in activity.

[1777] Some sequences used:

HEK.3 +1 FLAG-tag insertion, proly-trna{UGG}
P1 ext 5 nt, linker 3 nt
[SEQ ID NO: 3902]
GGCCCAGACUGAGCACGUGAGUUUUAGAGCUAGAAAUAGCAAGUUAAAAU
AAGGCUAGUCCGUUAUCAACUUGAAAAAGUGGCACCGAGUCGGUGCUGGA
GGAAGCAGGGCUUCCUUUCCUCUGCCAUCACUUAUCGUCGUCAUCCUUGU
AAUCCGUGCUCAGUCUGUCUGGCGGGGCUCGUUGGUCUAGGGGUAUGAUU
CUCGCUUCGGGUGCGAGAGGUCCCGGGUUCAAAUCCCGGACGAGCCCCGC
CUUUU
FANCF +5 G to T proly-tRNA{CGG} P1 ext 5 nt,
linker 3 nt
[SEQ ID NO: 3903]
GGAAUCCCUUCUGCAGCACCGUUUUAGAGCUAGAAAUAGCAAGUUAAA
AUAAGGCUAGUCCGUUAUCAACUUGAAAAAGUGGCACCGAGUCGGUGC
GGAAAAGCGAUCAAGGUGCUGCAGAAGGGAUCUGGCGGGGCUCGUUGG
UCUAGGGGUAUGAUUCUCGCUUCGGGUGCGAGAGGUCCCGGGUUCAAA
UCCCGGACGAGCCCCGCCUUUU
HEK3 ++1 10 nt insertion, proly-tRNA{UGG}
P1 ext 5 nt, linker 3 nt
[SEQ ID NO: 3904]
GGCCCAGACUGAGCACGUGAGUUUUAGAGCUAGAAAUAGCAAGUUAAA
AUAAGGCUAGUCCGUUAUCAACUUGAAAAAGUGGGACCGAGUCGGUCC
UCUGCCAUCAAAGCUUCGACCGUGCUCAGUCUUCUGCUCGAGGCGGGG
CUCGUUGGUCUAGGGGUAUGAUUCUCGCUUCGGGUGCGAGAGGUCCCG
GGUUCAAAUCCCGGACGAGCCCCGCCUCGAGCUUUU

[1778] The sequences reported in the data of FIGS. 85 and 86 are as follows:

FANCF +5 G to T pegRNA sequence:
[SEQ ID NO: 3905]
pace, scaffold template and PBSr-
GGAAUCCCUUCUGCAGCACCGUUUUAGAGCUAGAAAUAGCAAGUUAAAAU
AAGGCUAGUCCGUUAUCAACUUGAAAAAGUGGCACCGAGUCGGUGCGGAA
AAGCGAUCAAGGUGCUGCAGAAGGGA-partial CGG tRNA linker
8-UCUCUCUCUGGUCUAGGGGUAUGAUUCUCGCUUCGGGUGCGAGAGGUC
CCGGGUUCAAUUUU
FANCF +5 G to T pegRNA sequence:
[SEQ ID NO: 3906]
space, scaffold template and PBSr-
GGAAUCCCUUCUGCAGCACCGUUUUAGAGCUAGAAAUAGCAAGUUAAAAU
AAGGCUAGUCCGUUAUCAACUUGAAAAAGUGGCACCGAGUCGGUGCGGAA
AAGCGAUCAAGGUGCUGCAGAAGGGA-UGG P1 ext 5 linker 3-U
CUGGCGGGGCUCGUUGGUCUAGGGGUAUGAUUCUCGCUUUGGGUGCGAGA
GGUCCCGGGUUCAAAUCCCGGACGAGCCCCGCCUUUU
FANCF +5 G to T pegRNA sequence:
[SEQ ID NO: 3907]
space, scaffold template and PBSr-
GGAAUCCCUUCUGCAGCACCGUUUUAGAGCUAGAAAUAGCAAGUUAAAAU
AAGGCUAGUCCGUUAUCAACUUGAAAAAGUGGCACCGAGUCGGUGCGGAA
AAGCGAUCAAGGUGCUGCAGAAGGGA-UGG P1 ext 5 linker 8-U
CUCUCUCGGCGGGGCUCGUUGGUCUAGGGGUAUGAUUCUCGCUUUGGGUG
CGAGAGGUCCCGGGUUCAAAUCCCGGACGAGCCCCGCCUUUU
FANCF +5 G to T pegRNA sequence:
[SEQ ID NO: 3908]
space, scaffold template and PBSr-
GGAAUCCCUUCUGCAGCACCGUUUUAGAGCUAGAAAUAGCAAGUUAAAAU
AAGGCUAGUCCGUUAUCAACUUGAAAAAGUGGCACCGAGUCGGUGCGGAA
AAGCGAUCAAGGUGCUGCAGAAGGGA-UGG P1 ext 8 linker 3-U
CUCGAGGCGGGGCUCGUUGGUCUAGGGGUAUGAUUCUCGCUUUGGGUGCG
AGAGGUCCCGGGUUCAAAUCCCGGACGAGCCCCGCCUCGUUUU
FANCF +5 G to T pegRNA sequence:
[SEQ ID NO: 3909]
space, scaffold template and PBSr-
GGAAUCCCUUCUGCAGCACCGUUUUAGAGCUAGAAAUAGCAAGUUAAAAU
AAGGCUAGUCCGUUAUCAACUUGAAAAAGUGGCACCGAGUCGGUGCGGAA
AAGCGAUCAAGGUGCUGCAGAAGGGA-UGG P1 ext 8 linker 8-U
CUCUCUCCGAGGCGGGGCUCGUUGGUCUAGGGGUAUGAUUCUCGCUUUGG
GUGCGAGAGGUCCCGGGUUCAAAUCCCGGACGAGCCCCGCCUCGUUUU
FANCF +5 G to T pegRNA sequence:
[SEQ ID NO: 3910]
space, scaffold template and PBSr-
GGAAUCCCUUCUGCAGCACCGUUUUAGAGCUAGAAAUAGCAAGUUAAAAU
AAGGCUAGUCCGUUAUCAACUUGAAAAAGUGGCACCGAGUCGGUGCGGAA
AAGCGAUCAAGGUGCUGCAGAAGGGA-UGG P1 ext 11 linker 3-
UCUGCUCGAGGCGGGGCUCGUUGGUCUAGGGGUAUGAUUCUCGCUUUGGG
UGCGAGAGGUCCCGGGUUCAAAUCCCGGACGAGCCCCGCCUCGAGCUUUU
FANCF +5 G to T pegRNA sequence:
[SEQ ID NO: 3911]
space, scaffold template and PBSr-
GGAAUCCCUUCUGCAGCACCGUUUUAGAGCUAGAAAUAGCAAGUUAAAAU
AAGGCUAGUCCGUUAUCAACUUGAAAAAGUGGCACCGAGUCGGUGCGGAA
AAGCGAUCAAGGUGCUGCAGAAGGGA-UGG P1 ext 11 linker 8-
UCUCUCUCGCUCGAGGCGGGGCUCGUUGGUCUAGGGGUAUGAUUCUCGCU
UUGGGUGCGAGAGGUCCCGGGUUCAAAUCCCGGACGAGCCCCGCCUCGAG
CUUUU
HEK3 +1 10 nt insertion pegRNA sequence:
[SEQ ID NO: 3913]
space, scaffold template and PBSr-
GGCCCAGACTGAGCACGTGAGTTTTAGAGCTAGAAATAGCAAGTTAAAAT
AAGGCTAGTCCGTTATCAACTTGAAAAAGTGGCACCGAGTCGGTGCTCTG
CCATCAAAGCTTCGACCGTGCTCAGTCTG-UGG P1 ext 5 linker
3-UCUGGCGGGGCUCGUUGGUCUAGGGGUAUGAUUCUCGCUUUGGGUGCG
AGAGGUCCCGGGUUCAAAUCCCGGACGAGCCCCGCCUUUU
HEK3 +1 FLAG insertion pegRNA sequence:
[SEQ ID NO: 3914]
space, scaffold template and PBSr-
GGCCCAGACUGAGCACGUGAGUUUUAGAGCUAGAAAUAGCAAGUUAAAAU
AAGGCUAGUCCGUUAUCAACUUGAAAAAGUGGCACCGAGUCGGUGCUGGA
GGAAGCAGGGCUUCCUUUCCUCUGCCAUCACUUAUCGUCGUCAUCCUUGU
AAUCCGUGCUCAGUCUG-partial CGG tRNA linker 8-UCUCUC
UCUGGUCUAGGGGUAUGAUUCUCGCUUCGGGUGCGAGAGGUCCCGGGUUC
AAUUUU
HEK3 +1 FLAG insertion pegRNA sequence:
[SEQ ID NO: 3915]
space, scaffold template and PBSr-
GGCCCAGACUGAGCACGUGAGUUUUAGAGCUAGAAAUAGCAAGUUAAAAU
AAGGCUAGUCCGUUAUCAACUUGAAAAAGUGGCACCGAGUCGGUGCUGGA
GGAAGCAGGGCUUCCUUUCCUCUGCCAUCACUUAUCGUCGUCAUCCUUGU
AAUCCGUGCUCAGUCUG-UGG P1 ext 5 linker 3-UCUGGCGGGG
CUCGUUGGUCUAGGGGUAUGAUUCUCGCUUUGGGUGCGAGAGGUCCCGGG
UUCAAAUCCCGGACGAGCCCCGCCUUUU
HEK3 +1 FLAG insertion pegRNA sequence:
[SEQ ID NO: 3916]
space, scaffold template and PBSr-
GGCCCAGACUGAGCACGUGAGUUUUAGAGCUAGAAAUAGCAAGUUAAAAU
AAGGCUAGUCCGUUAUCAACUUGAAAAAGUGGCACCGAGUCGGUGCUGGA
GGAAGCAGGGCUUCCUUUCCUCUGCCAUCACUUAUCGUCGUCAUCCUUGU
AAUCCGUGCUCAGUCUG-UGG P1 ext 5 linker 8-UCUCUCUCGG
CGGGGCUCGUUGGUCUAGGGGUAUGAUUCUCGCUUUGGGUGCGAGAGGUC
CCGGGUUCAAAUCCCGGACGAGCCCCGCCUUUU
HEK3 +1 FLAG insertion pegRNA sequence:
[SEQ ID NO: 3917]
space, scaffold template and PBSr-
GGCCCAGACUGAGCACGUGAGUUUUAGAGCUAGAAAUAGCAAGUUAAAA
UAAGGCUAGUCCGUUAUCAACUUGAAAAAGUGGCACCGAGUCGGUGCUGG
AGGAAGCAGGGCUUCCUUUCCUCUGCCAUCACUUAUCGUCGUCAUCCUUG
UAAUCCGUGCUCAGUCUG-UGG P1 ext 8 linker 8-
UCUCUCUCCGAGGCGGGGCUCGUUGGUCUAGGGGUAUGAUUCUCGCUUUG
GGUGCGAGAGGUCCCGGGUUCAAAUCCCGGACGAGCCCCGCCUCGUUUU
HEK3 +1 FLAG insertion pegRNA sequence:
[SEQ ID NO: 3918]
space, scaffold template and PBSr-
GGCCCAGACUGAGCACGUGAGUUUUAGAGCUAGAAAUAGCAAGUUAAAAU
AAGGCUAGUCCGUUAUCAACUUGAAAAAGUGGCACCGAGUCGGUGCUGGA
GGAAGCAGGGCUUCCUUUCCUCUGCCAUCACUUAUCGUCGUCAUCCUUGU
AAUCCGUGCUCAGUCUG-UGG P1 ext 11 linker 8-
UCUCUCUCGCUCGAGGCGGGGCUCGUUGGUCUAGGGGUAUGAUUCUCGCU
UUGGGUGCGAGAGGUCCCGGGUUCAAAUCCCGGACGAGCCCCGCCUCGAG
UCUUU
HEK3 +1 FLAG insertion pegRNA sequence:
[SEQ ID NO: 3919]
space, scaffold template and PBSr-
GGCCCAGACUGAGCACGUGAGUUUUAGAGCUAGAAAUAGCAAGUUAAAAU
AAGGCUAGUCCGUUAUCAACUUGAAAAAGUGGCACCGAGUCGGUGCUGGA
GGAAGCAGGGCUUCCUUUCCUCUGCCAUCACUUAUCGUCGUCAUCCUUGU
AAUCCGUGCUCAGUCUG-UGG P1 ext 14 linker 8-
UCUCUCUCGGUGCUCGAGGCGGGGCUCGUUGGUCUAGGGGUAUGAUUCUC
GCUUUGGGUGCGAGAGGUCCCGGGUUCAAAUCCCGGACGAGCCCCGCCUC
GAGCACCUUUU
RNF2 +1 C to A pegRNA sequence:
[SEQ ID NO: 3920]
space, scaffold template and PBSr-
GUCAUCUUAGUCAUUACCUGGUUUUAGAGCUAGAAAUAGCAAGUUAAAAU
AAGGCUAGUCCGUUAUCAACUUGAAAAAGUGGCACCGAGUCGGUGCGAAC
ACCUCAUGUAAUGACUAAGAUG-tRNA-Pro{CGG}-5-
UCUGGCGGGGCUCGUUGGUCUAGGGGUAUGAUUCUCGCUUCGGGUGCGAG
AGGUCCCGGGUUCAAAUCCCGGACGAGCCCCGCC
RNF2 +1 C to A pegRNA sequence:
[SEQ ID NO: 3921]
space, scaffold template and PBSr-
GUCAUCUUAGUCAUUACCUGGUUUUAGAGCUAGAAAUAGCAAGUUAAAAU
AAGGCUAGUCCGUUAUCAACUUGAAAAAGUGGCACCGAGUCGGUGCGAAC
ACCUCAUGUAAUGACUAAGAUG-tRNA-Pro{CGG}-8-
UCUCGAGGCGGGGCUCGUUGGUCUAGGGGUAUGAUUCUCGCUUCGGGUGC
GAGAGGUCCCGGGUUCAAAUCCCGGACGAGCCCCGCCUCGUUUU
RNF2 +1 C to A pegRNA sequence:
[SEQ ID NO: 3922]
space, scaffold template and PBSr-
GUCAUCUUAGUCAUUACCUGGUUUUAGAGCUAGAAAUAGCAAGUUAAAAU
AAGGCUAGUCCGUUAUCAACUUGAAAAAGUGGCACCGAGUCGGUGCGAAC
ACCUCAUGUAAUGACUAAGAUG-tRNA-Pro{CGG}-11-
UCUGCUCGAGGCGGGGCUCGUUGGUCUAGGGGUAUGAUUCUCGCUUCGGG
UGCGAGAGGUCCCGGGUUCAAAUCCCGGACGAGCCCCGCCUCGAGCUUUU
RNF2 +1 C to A pegRNA sequence:
[SEQ ID NO: 3923]
space, scaffold template and PBSr-
GUCAUCUUAGUCAUUACCUGGUUUUAGAGCUAGAAAUAGCAAGUUAAAAU
AAGGCUAGUCCGUUAUCAACUUGAAAAAGUGGCACCGAGUCGGUGCGAAC
ACCUCAUGUAAUGACUAAGAUG-tRNA-Pro{Lys}-5-
UCUGGCGGGCCCGGAUAGCUCAGUCGGUAGAGCAUCAGACUUUUAAUCUG
AGGGUCCAGGGUUCAAGUCCCUGUUCGGGCCCGCCUUUU
RNF2 +1 C to A pegRNA sequence:
[SEQ ID NO: 3924]
space, scaffold template and PBSr-
GUCAUCUUAGUCAUUACCUGGUUUUAGAGCUAGAAAUAGCAAGUUAAAAU
AAGGCUAGUCCGUUAUCAACUUGAAAAAGUGGCACCGAGUCGGUGCGAAC
ACCUCAUGUAAUGACUAAGAUG-tRNA-Pro{Lys}-8-
UCUCGAGGCGGGCCCGGAUAGCUCAGUCGGUAGAGCAUCAGACUUUUAAU
CUGAGGGUCCAGGGUUCAAGUCCCUGUUCGGGCCCGCCUCGUUUU
RNF2 +1 C to A pegRNA sequence:
[SEQ ID NO: 3925]
space, scaffold template and PBSr-
GUCAUCUUAGUCAUUACCUGGUUUUAGAGCUAGAAAUAGCAAGUUAAAAU
AAGGCUAGUCCGUUAUCAACUUGAAAAAGUGGCACCGAGUCGGUGCGAAC
ACCUCAUGUAAUGACUAAGAUG-tRNA-Pro{UGG}-8-
UCUCGAGGCGGGGCUCGUUGGUCUAGGGGUAUGAUUCUCGCUUUGGGUGC
GAGAGGUCCCGGGUUCAAAUCCCGGACGAGCCCCGCCUCGUUUU
RNF2 +1 C to A pegRNA sequence:
[SEQ ID NO: 3926]
space, scaffold template and PBSr-
GUCAUCUUAGUCAUUACCUGGUUUUAGAGCUAGAAAUAGCAAGUUAAAAU
AAGGCUAGUCCGUUAUCAACUUGAAAAAGUGGCACCGAGUCGGUGCGAAC
ACCUCAUGUAAUGACUAAGAUG-tRNA-Pro{UGG}-11-
UCUGCUCGAGGCGGGGCUCGUUGGUCUAGGGGUAUGAUUCUCGCUUUGGG
UGCGAGAGGUCCCGGGUUCAAAUCCCGGACGAGCCCCGCCUCGAGCUUUU
RNF2 +1 C to A pegRNA sequence:
[SEQ ID NO: 3927]
space, scaffold template and PBSr-
GUCAUCUUAGUCAUUACCUGGUUUUAGAGCUAGAAAUAGCAAGUUAAAAU
AAGGCUAGUCCGUUAUCAACUUGAAAAAGUGGCACCGAGUCGGUGCGAAC
ACCUCAUGUAAUGACUAAGAUG-tRNA-Pro{UGG}-8-longer
linker-UCUCUCUCCGAGGCGGGGCUCGUUGGUCUAGGGGUAUGAUUCU
CGCUUUGGGUGCGAGAGGUCCCGGGUUCAAAUCCCGGACGAGCCCCGCCU
CGUUUU
RNF2 +1 C to A pegRNA sequence:
[SEQ ID NO: 3928]
space, scaffold template and PBSr-
GUCAUCUUAGUCAUUACCUGGUUUUAGAGCUAGAAAUAGCAAGUUAAAAU
AAGGCUAGUCCGUUAUCAACUUGAAAAAGUGGCACCGAGUCGGUGCGAAC
ACCUCAUGUAAUGACUAAGAUG-tRNA-Pro{UGG}-11-longer
linker-UCUCUCUCGCUCGAGGCGGGGCUCGUUGGUCUAGGGGUAUGAU
UCUCGCUUUGGGUGCGAGAGGUCCCGGGUUCAAAUCCCGGACGAGCCCCG
CCUCGAGCUUUU
RNF2 +1 C to A pegRNA sequence:
[SEQ ID NO: 3929]
space, scaffold template and PBSr-
GUCAUCUUAGUCAUUACCUGGUUUUAGAGCUAGAAAUAGCAAGUUAAAAU
AAGGCUAGUCCGUUAUCAACUUGAAAAAGUGGCACCGAGUCGGUGCGAAC
ACCUCAUGUAAUGACUAAGAUG-tRNA-Pro{UGG}-14-longer
linker-UCUCUCUCGGUGCUCGAGGCGGGGCUCGUUGGUCUAGGGGUAU
GAUUCUCGCUUUGGGUGCGAGAGGUCCCGGGUUCAAAUCCCGGACGAGCC
CCGCCUCGAGCACCUUUU

### Example 23. Use of Prime Editing to Correct CDKL5 and Sickle Cell Anemia

[1779] Use of PE to Design Mouse Model of CDKL5 with 1412delA Mutation

[1780] CDKL5 Deficiency Disorder (CDD) is a neurodegenerative disease most often caused by spontaneous mutations in the cyclin-dependent kinase-like 5 gene. Symptoms manifest in early childhood and include seizures, irregular sleeping patterns, gastrointestinal stress, and developmental delay. Some mutations which cause CDD, including 1412delA, cannot be corrected with base editing. However, prime editing has the potential to precisely correct all base-to-base changes, deletions, and insertions. With focus on the 1412delA mutation, this Example designed and tested pegRNAs capable of inserting the mutation in hopes to establish a mouse neuronal cell line (N2A) harboring the mutation. This will allow for extensive screening potentially therapeutic pegRNAs that correct the mutation. The ultimate goal is to be able to move into a CDD mouse model with the 1412delA mutation to assess therapeutic effect. No current mouse models of CDD have a humanized allele, however optimization of pegRNAs is underway in HEK293T cells as well. FIGS. 87 and 88 are the results from a pilot screen in N2A cells where the pegRNA installs 1412Adel, with details about the primer binding site (PBS) length and reverse transcriptase (RT) template length. (Shown with and without indels)

### Use of PE to Treat Sickle Cell Anemia (SCA)

[1781] Sickle cell anemia (SCA) is a recessive blood disorder caused by a glutamate-to-valine mutation at position 6 in the β-globin gene. The result is sickled red blood cells that are poor oxygen transporters and prone to aggregation. Symptoms of aggregation can be life-threatening. Previously, the D. Liu lab was able to show both the installation and correction of the SCA locus in HEK293T cells using prime editing via DNA plasmid transfection. Since hematopoietic stem cells (HSCs) are difficult to edit via DNA plasmid transfection, this Example tested the PE3 system in HSCs with protein and mRNA nucleofection. FIG. 89 are the results of editing at a proxy locus in the β-globin gene and at HEK3 in healthy HSCs, varying the concentration of editor to pegRNA and nicking gRNA.

mRNA Nucleofection Protocol:

[1782] The protocol was improved by adjusting the ratio of editor to guides ([editor] to [guide] ratio or editor:guide ratio)

[1783] The nicking guide protospacer sequence was:

(SEQ ID NO: 3991)
CCTTGATACCAACCTGCCCA

[1784] The pegRNA sequence was:

(SEQ ID NO: 3992)
CATGGTGCACCTGACTCCTGGTTTTAGAGCTAGAAATAGCAAGTTAAAA
TAAGGCTAGTCCGTTATCAACTTGAAAAAGTGGCACCGAGTCGGTGCAG
ACTTCTCTTCAGGAGTCAGGTGCACTTT

[1785] 1. Thaw CD34+ cells and pre-stimulate in X-Vivo15 media with cytokines (SCF, Flt3 and TPO) for 24 hrs. Seeding density 1 million cells/mL.

[1786] 2. Next day (post 24 hrs), aspirate CD34+ cells (1×105) and wash once with PBS (centrifugation performed at 300 g for 10 mins in RT) and resuspend in P3 solution (Lonza) (20 ul per condition).

[1787] 3. In hood, combine 2 ug of SpPE2 mRNA, 1 ug combined of pegRNA and sgRNA in a sterile PCR strip on ice. Adjust the volume to 20 ul (cells in P3 solution+mRNA & gRNA mix).

[1788] 4. Pipette up cell suspension into 20 uL Lonza4D 16 well strip and electroporate with program DS130.

[1789] 5. Wait for 10 to 15 mins post electrporation and add 80 uL of X-Vivo10+cytokine media to cell suspension and transfer to pre-warmed X-Vivo10 with cytokine media.

[1790] 6. Harvest cells 72 hours after electroporation and check the cell recovery and do genotyping in bulk population and sorted CD34+ and CD34+90+ populations as well.

Wildtype CDKL5 protein (Accession No.
NP_001032420) (isoform 1 - human)
(SEQ ID NO: 3993)
MKIPNIGNVM NKFEILGVVG EGAYGVVLKC RHKETHEIVA
IKKFKDSEEN EEVKETTLRE LKMLRTLKQE NIVELKEAFR
RRGKLYLVFE YVEKNMLELL EEMPNGVPPE KVKSYIYQLI
KAIHWCHKND IVHRDIKPEN LLISHNDVLK LCDFGFARNL
SEGNNANYTE YVATRWYRSP ELLLGAPYGK SVDMWSVGCI
LGELSDGQPL FPGESEIDQL FTIQKVLGPL PSEQMKLFYS
NPRFHGLRFP AVNHPQSLER RYLGILNSVL LDLMKNLLKL
DPADRYLTEQ CLNHPTFQTQ RLLDRSPSRS AKRKPYHVES
STLSNRNQAG KSTALQSHHR SNSKDIQNLS VGLPRADEGL
PANESFLNGN LAGASLSPLH TKTYQASSQP GSTSKDLTNN
NIPHLLSPKE AKSKTEFDFN IDPKPSEGPG TKYLKSNSRS
QQNRHSFMES SQSKAGTLQP NEKQSRHSYI DTIPQSSRSP
SYRTKAKSHG ALSDSKSVSN LSEARAQIAE PSTSRYFPSS
CLDLNSPTSP TPTRHSDTRT LLSPSGRNNR NEGTLDSRRT
TTRHSKTMEE LKLPEHMDSS HSHSLSAPHE SFSYGLGYTS
PFSSQQRPHR HSMYVTRDKV RAKGLDGSLS IGQGMAARAN
SLQLLSPQPG EQLPPEMTVA RSSVKETSRE GTSSFHTRQK
SEGGVYHDPH SDDGTAPKEN RHLYNDPVPR RVGSFYRVPS
PRPDNSFHEN NVSTRVSSLP SESSSGTNHS KRQPAFDPWK
SPENISHSEQ LKEKEKQGFF RSMKKKKKKS QTVPNSDSPD
LLTLQKSIHS ASTPSSRPKE WRPEKISDLQ TQSQPLKSLR
KLLHLSSASN HPASSDPRFQ PLTAQQTKNS FSEIRIHPLS
QASGGSSNIR QEPAPKGRPA LQLPDGGCDG RRQRHHSGPQ
DRRFMLRTTE QQGEYFCCGD PKKPHTPCVP NRALHRPISS
PAPYPVLQVR GTSMCPTLQV RGTDAFSCPT QQSGFSFFVR
HVMREALIHR AQVNQAALLT YHENAALTGK

### Example 24. Use of Prime Editing to Target Pathogenic AOL1 Alleles as Treatment for Non-Diabetic Chronic Kidney Disease

[1791] This Example designed PEgRNAs that are capable of targeting pathogenic APOL1 alleles for use with prime editing to treat or reduce the likelihood of developing a renal disease.

[1792] End-stage kidney failure (ESKD) is a growing problem that now affects over half a million individuals in the United States. The cost of caring for patients with ESKD is currently over 40 billion dollars per year. In the U.S., the likelihood that subjects of African descent will develop ESKD is 4 to 5 times higher than for Americans without African ancestry. These facts are reflected in the disparity between the 12-13% of the U.S. population with African descent and the 40% of U.S. dialysis patients who are African-American. The epidemic of renal disease risk factors, such as obesity and metabolic syndrome, suggests that the magnitude of this problem will only increase.

[1793] There are no specific therapies for the vast majority of progressive kidney diseases. Some types of chronic renal disease progression can be slowed by blood pressure control with specific agents, but nephrologists cannot accurately predict which patients will respond. Moreover, while successful treatment typically slows progression, it neither prevents disease nor halts disease progression.

[1794] Recently it was determined that that specific genetic variants that alter the protein sequence of APOIipoprotein-L1 (APOL1) are associated with progressive kidney disease. Surprisingly, APOL1 kidney disease variants have a major impact on multiple different types of kidney disease including hypertension-associated end-stage renal disease (H-ESRD), focal segmental glomerulosclerosis (FSGS), and HIV-associated nephropathy (HIVAN). Individuals with these variant APOL1 alleles have a 7-30 fold increased risk for kidney disease. Based on the high frequency of these APOL1 risk alleles, more than 3.5 million African Americans likely have the high risk APOL1 genotype. African Americans without the high risk genotype have little excess risk compared with Americans of European ancestry.

[1795] Despite evidence that variants in the APOL1 gene cause renal disease, very little is known about the biology of its product, APOL1, or its role in the kidney. APOL1 has a defined role in resistance to trypanosomes, and the G1 and G2 variants appear to have become common in Africa because they confer protection against the forms of trypanosomes that cause African Sleeping Sickness.

[1796] There still exists a need for therapies for kidney diseases in patients with one or more APOL1 risk alleles, which cause great morbidity and mortality with high economic impact in this and other subject populations.

[1797] This Example provides three exemplary PEgRNA design options based on a specific exemplary target sequence that may be used with prime editing to correct APOL1 defective alleles.

[1798] PEgRNA 1

[1799] Designing PEgRNAs for APOL1 allele rs73885319 (p.S342G). This represents a G→A correction in affected individuals. The target sequence is 5-GGAGTCAAGCTCACGGATGTGGCCCTGTA (G-to-A)GCTTCTTTCTTGTG CTGGATGTAGTCTACCT-3.(SEQ ID NO: 3995)

[1800] The protospacer (bolded above) is AAGCTCACGGATGTGGCCCC (SEQ ID NO: 3996). The selected PE comprises a SaCas9(D10A).

[1801] The primer binding sites can be:

(SEQ ID NO: 3997)
GTGGCCCC
(SEQ ID NO: 3998)
TGTGGCCCC
(SEQ ID NO: 3999)
ATGTGGCCCC
(SEQ ID NO: 4000)
GATGTGGCCCC
(SEQ ID NO: 4001)
GGATGTGGCCCC
(SEQ ID NO: 4002)
CGGATGTGGCCCC
(SEQ ID NO: 4003)
ACGGATGTGGCCCC
(SEQ ID NO: 4004)
CACGGATGTGGCCCC
(SEQ ID NO: 4005)
TCACGGATGTGGCCCC
(SEQ ID NO: 4006)
CTCACGGATGTGGCCCC

[1802] The RT templates can be:

(SEQ ID NO: 4007)
AAGAAGCTTACA
(SEQ ID NO: 4008)
AAAGAAGCTTACA
(SEQ ID NO: 4009)
GAAAGAAGCTTACA
(SEQ ID NO: 4010)
AGAAAGAAGCTTACA
(SEQ ID NO: 4011)
AAGAAAGAAGCTTACA
(SEQ ID NO: 4012)
CAAGAAAGAAGCTTACA
(SEQ ID NO: 4013)
ACAAGAAAGAAGCTTACA
(SEQ ID NO: 4014)
CACAAGAAAGAAGCTTACA
(SEQ ID NO: 4015)
GCACAAGAAAGAAGCTTACA
(SEQ ID NO: 4016)
AGCACAAGAAAGAAGCTTACA
(SEQ ID NO: 4017)
CAGCACAAGAAAGAAGCTTACA
(SEQ ID NO: 4018)
CCAGCACAAGAAAGAAGCTTACA
(SEQ ID NO: 4019)
TCCAGCACAAGAAAGAAGCTTACA
(SEQ ID NO: 4020)
ATCCAGCACAAGAAAGAAGCTTACA.

[1803] The nicking templates can be:

(SEQ ID NO: 4021)
GCTTTGATTCGTACACGAGG

[1804] PEgRNA 2

[1805] Designing PEgRNAs for APOL1 allele rs60910145. This represents a G→T correction in affected individuals.

[1806] The protospacer is

(SEQ ID NO: 4022)
GCTGGAGGAGAAGCTAAACA.

The selected PE comprises SpCas9(D10A)-NG.

[1807] The primer binding sites can be:

(SEQ ID NO: 4023)
GAAGCTAA
(SEQ ID NO: 4024)
AGAAGCTAA
(SEQ ID NO: 4025)
GAGAAGCTAA
(SEQ ID NO: 4026)
GGAGAAGCTAA
(SEQ ID NO: 4027)
AGGAGAAGCTAA
(SEQ ID NO: 4028)
GAGGAGAAGCTAA
(SEQ ID NO: 4029)
GGAGGAGAAGCTAA
(SEQ ID NO: 4030)
TGGAGGAGAAGCTAA
(SEQ ID NO: 4031)
CTGGAGGAGAAGCTAA
(SEQ ID NO: 4032)
GCTGGAGGAGAAGCTAA.

[1808] The RT template can be (cannot end in C):

(SEQ ID NO: 4033)
AGAATGT
(SEQ ID NO: 4034)
GAGAATGT
(SEQ ID NO: 4035)
TGAGAATGT
(SEQ ID NO: 4036)
TTGAGAATGT
(SEQ ID NO: 4037)
GTTGAGAATGT
(SEQ ID NO: 4038)
TGTTGAGAATGT
(SEQ ID NO: 4039)
TTGTTGAGAATGT
(SEQ ID NO: 4040)
ATTGTTGAGAATGT
(SEQ ID NO: 4041)
TATTGTTGAGAATGT
(SEQ ID NO: 4042)
TTATTGTTGAGAATGT
(SEQ ID NO: 4043)
ATTATTGTTGAGAATGT
(SEQ ID NO: 4044)
AATTATTGTTGAGAATGT
(SEQ ID NO: 4045)
TAATTATTGTTGAGAATGT
(SEQ ID NO: 4046)
ATAATTATTGTTGAGAATGT.

[1809] The nicking templates can be:

(SEQ ID NO: 4047)
CCTGTGGTCACAGTTCTTGG
(SEQ ID NO: 4048)
CCACAGGGCAGGGCAGCCAC

[1810] PEgRNA 3

[1811] Designing PEgRNAs for APOL1 allele rs71785313. This represents an insert, as follows:

(SEQ ID NO: 4049)
ATTCTCAACAA[insert: TAATTA]TAAGATTC

[1812] The protospacer can be:

(SEQ ID NO: 4050)
TCTCAACAATAAGATTCTGC

[1813] The PE comprises SaKKH-PE2.

[1814] The primer binding site can be:

(SEQ ID NO: 4051)
TTCTCAAC
(SEQ ID NO: 4052)
ATTCTCAAC
(SEQ ID NO: 4053)
CATTCTCAAC
(SEQ ID NO: 4054)
ACATTCTCAAC
(SEQ ID NO: 4055)
AACATTCTCAAC
(SEQ ID NO: 4056)
AAACATTCTCAAC
(SEQ ID NO: 4057)
TAAACATTCTCAAC
(SEQ ID NO: 4058)
CTAAACATTCTCAAC
(SEQ ID NO: 4059)
GCTAAACATTCTCAAC
(SEQ ID NO: 4060)
AGCTAAACATTCTCAAC

[1815] The RT template can be:

(SEQ ID NO: 4061)
AATCTTATAATTATT
(SEQ ID NO: 4062)
GAATCTTATAATTATT
(SEQ ID NO: 4063)
AGAATCTTATAATTATT
(SEQ ID NO: 4064)
CAGAATCTTATAATTATT
(SEQ ID NO: 4065)
GCAGAATCTTATAATTATT
(SEQ ID NO: 4066)
TGCAGAATCTTATAATTATT
(SEQ ID NO: 4067)
CTGCAGAATCTTATAATTATT
(SEQ ID NO: 4068)
CCTGCAGAATCTTATAATTATT
(SEQ ID NO: 4069)
GCCTGCAGAATCTTATAATTATT
(SEQ ID NO: 4070)
CGCCTGCAGAATCTTATAATTATT
(SEQ ID NO: 4071)
CCGCCTGCAGAATCTTATAATTATT
(SEQ ID NO: 4072)
TCCGCCTGCAGAATCTTATAATTATT
(SEQ ID NO: 4073)
GTCCGCCTGCAGAATCTTATAATTATT
(SEQ ID NO: 4074)
GGTCCGCCTGCAGAATCTTATAATTATT.

[1816] The nicking templates can be:

(SEQ ID NO: 4047)
CCTGTGGTCACAGTTCTTGG
(SEQ ID NO: 4048)
CCACAGGGCAGGGCAGCCAC

### OTHER REFERENCES MENTIONED THROUGHOUT THIS DISCLOSURE

[1817] The following references are each incorporated herein by reference in their entireties.
[1818] 1. Jinek, M. et al. A Programmable Dual-RNA-Guided DNA Endonuclease in Adaptive Bacterial Immunity. Science 337, 816-821 (2012).
[1819] 2. Cong, L. et al. Multiplex Genome Engineering Using CRISPR/Cas Systems. Science 339, 819-823 (2013).
[1820] 3. Komor, A. C., Badran, A. H. & Liu, D. R. CRISPR-Based Technologies for the Manipulation of Eukaryotic Genomes. Cell 168, 20-36 (2017).
[1821] 4. Komor, A. C., Kim, Y. B., Packer, M. S., Zuris, J. A. & Liu, D. R. Programmable editing of a target base in genomic DNA without double-stranded DNA cleavage. Nature 533, 420-424 (2016).
[1822] 5. Nishida, K. et al. Targeted nucleotide editing using hybrid prokaryotic and vertebrate adaptive immune systems. Science 353, aaf8729 (2016).
[1823] 6. Gaudelli, N. M. et al. Programmable base editing of A●T to G●C in genomic DNA without DNA cleavage. Nature 551, 464-471 (2017).
[1824] 7. ClinVar, July 2019.
[1825] 8. Dunbar, C. E. et al. Gene therapy comes of age. Science 359, eaan4672 (2018).
[1826] 9. Cox, D. B. T., Platt, R. J. & Zhang, F. Therapeutic genome editing: prospects and challenges. Nat. Med. 21, 121-131 (2015).
[1827] 10. Adli, M. The CRISPR tool kit for genome editing and beyond. Nat. Commun. 9, 1911 (2018).
[1828] 11. Kleinstiver, B. P. et al. Engineered CRISPR-Cas9 nucleases with altered PAM specificities. Nature 523, 481-485 (2015).
[1829] 12. Kleinstiver, B. P. et al. High-fidelity CRISPR-Cas9 nucleases with no detectable genome-wide off-target effects. Nature 529, 490-495 (2016).
[1830] 13. Hu, J. H. et al. Evolved Cas9 variants with broad PAM compatibility and high DNA specificity. Nature 556, 57-63 (2018).
[1831] 14. Nishimasu, H. et al. Engineered CRISPR-Cas9 nuclease with expanded targeting space. Science 361, 1259-1262 (2018).
[1832] 15. Jasin, M. & Rothstein, R. Repair of strand breaks by homologous recombination. Cold Spring Harb. Perspect. Biol. 5, a012740 (2013).
[1833] 16. Paquet, D. et al. Efficient introduction of specific homozygous and heterozygous mutations using CRISPR/Cas9. Nature 533, 125-129 (2016).
[1834] 17. Kosicki, M., Tomberg, K. & Bradley, A. Repair of double-strand breaks induced by CRISPR-Cas9 leads to large deletions and complex rearrangements. Nat. Biotechnol. 36, 765-771 (2018).
[1835] 18. Haapaniemi, E., Botla, S., Persson, J., Schmierer, B. & Taipale, J. CRISPR—Cas9 genome editing induces a p53-mediated DNA damage response. Nat. Med. 24, 927-930 (2018).
[1836] 19. Ihry, R. J. et al. p53 inhibits CRISPR-Cas9 engineering in human pluripotent stem cells. Nat. Med. 24, 939-946 (2018).
[1837] 20. Richardson, C. D., Ray, G. J., DeWitt, M. A., Curie, G. L. & Corn, J. E. Enhancing homology-directed genome editing by catalytically active and inactive CRISPR-Cas9 using asymmetric donor DNA. Nat. Biotechnol. 34,339-344 (2016).
[1838] 21. Srivastava, M. et al. An Inhibitor of Nonhomologous End-Joining Abrogates Double-Strand Break Repair and Impedes Cancer Progression. Cell 151, 1474-1487 (2012).
[1839] 22. Chu, V. T. et al. Increasing the efficiency of homology-directed repair for CRISPR-Cas9-induced precise gene editing in mammalian cells. Nat. Biotechnol. 33, 543-548 (2015).
[1840] 23. Maruyama, T. et al. Increasing the efficiency of precise genome editing with CRISPR-Cas9 by inhibition of nonhomologous end joining. Nat. Biotechnol. 33, 538-542 (2015).
[1841] 24. Kim, Y. B. et al. Increasing the genome-targeting scope and precision of base editing with engineered Cas9-cytidine deaminase fusions. Nat. Biotechnol. 35, 371-376 (2017).
[1842] 25. Li, X. et al. Base editing with a Cpf1-cytidine deaminase fusion. Nat. Biotechnol. 36, 324-327 (2018).
[1843] 26. Gehrke, J. M. et al. An APOBEC3A-Cas9 base editor with minimized bystander and off-target activities. Nat. Biotechnol. (2018). doi:10.1038/nbt.4199
[1844] 27. Rees, H. A. & Liu, D. R. Base editing: precision chemistry on the genome and transcriptome of living cells. Nat. Rev. Genet. 1 (2018). doi:10.1038/s41576-018-0059-1.
[1845] 28. Ostertag, E. M. & Kazazian Jr, H. H. Biology of Mammalian L1 Retrotransposons. Annu. Rev. Genet. 35, 501-538 (2001).
[1846] 29. Zimmerly, S., Guo, H., Perlman, P. S. & Lambowltz, A. M. Group II intron mobility occurs by target DNA-primed reverse transcription. Cell 82, 545-554 (1995).
[1847] 30. Luan, D. D., Korman, M. H., Jakubczak, J. L. & Eickbush, T. H. Reverse transcription of R2Bm RNA is primed by a nick at the chromosomal target site: a mechanism for non-LTR retrotransposition. Cell 72, 595-605 (1993).
[1848] 31. Feng, Q., Moran, J. V., Kazazian, H. H. & Boeke, J. D. Human L1 retrotransposon encodes a conserved endonuclease required for retrotransposition. Cell 87, 905-916 (1996).
[1849] 32. Jinek, M. et al. Structures of Cas9 Endonucleases Reveal RNA-Mediated Conformational Activation. Science 343, 1247997 (2014).
[1850] 33. Jiang, F. et al. Structures of a CRISPR-Cas9 R-loop complex primed for DNA cleavage. Science aad8282 (2016). doi:10.1126/science.aad8282
[1851] 34. Qi, L. S. et al. Repurposing CRISPR as an RNA-Guided Platform for Sequence-Specific Control of Gene Expression. Cell 152, 1173-1183 (2013).
[1852] 35. Tang, W., Hu, J. H. & Liu, D. R. Aptazyme-embedded guide RNAs enable ligand-responsive genome editing and transcriptional activation. Nat. Commun. 8, 15939 (2017).
[1853] 36. Shechner, D. M., Hacisuleyman, E., Younger, S. T. & Rinn, J. L. Multiplexable, locus-specific targeting of long RNAs with CRISPR-Display. Nat. Methods 12, 664-670 (2015).
[1854] 37. Anders, C. & Jinek, M. Chapter One—In vitro Enzymology of Cas9. in Methods in Enzymology (eds. Doudna, J. A. & Sontheimer, E. J.) 546, 1-20 (Academic Press, 2014).
[1855] 38. Briner, A. E. et al. Guide RNA Functional Modules Direct Cas9 Activity and Orthogonality. Mol. Cell 56, 333-339 (2014).
[1856] 39. Nowak, C. M., Lawson, S., Zerez, M. & Bleris, L. Guide RNA engineering for versatile Cas9 functionality. Nucleic Acids Res. 44, 9555-9564 (2016).
[1857] 40. Sternberg, S. H., Redding, S., Jinek, M., Greene, E. C. & Doudna, J. A. DNA interrogation by the CRISPR RNA-guided endonuclease Cas9. Nature 507, 62-67 (2014).
[1858] 41. Mohr, S. et al. Thermostable group II intron reverse transcriptase fusion proteins and their use in cDNA synthesis and next-generation RNA sequencing. RNA 19, 958-970 (2013).

[1859] 42. Stamos, J. L., Lentzsch, A. M. & Lambowitz, A. M. Structure of a Thermostable Group II Intron Reverse Transcriptase with Template-Primer and Its Functional and Evolutionary Implications. Mol. Cell 68, 926-939.e4 (2017).
[1860] 43. Zhao, C. & Pyle, A. M. Crystal structures of a group II intron maturase reveal a missing link in spliceosome evolution. Nat. Struct. Mol. Biol. 23, 558-565 (2016).
[1861] 44. Zhao, C., Liu, F. & Pyle, A. M. An ultraprocessive, accurate reverse transcriptase encoded by a metazoan group II intron. RNA 24, 183-195 (2018).
[1862] 45. Ran, F. A. et al. Genome engineering using the CRISPR-Cas9 system. Nat. Protoc. 8, 2281-2308 (2013).
[1863] 46. Liu, Y., Kao, H.-I. & Bambara, R. A. Flap endonuclease 1: a central component of DNA metabolism. Annu. Rev. Biochem. 73, 589-615 (2004).
[1864] 47. Krokan, H. E. & Bjørås, M. Base Excision Repair. Cold Spring Harb. Perspect. Biol. 5, (2013).
[1865] 48. Kelman, Z. PCNA: structure, functions and interactions. Oncogene 14, 629-640 (1997).
[1866] 49. Choe, K. N. & Moldovan, G.-L. Forging Ahead through Darkness: PCNA, Still the Principal Conductor at the Replication Fork. Mol. Cell 65, 380-392 (2017).
[1867] 50. Li, X., Li, J., Harrington, J., Lieber, M. R. & Burgers, P. M. Lagging strand DNA synthesis at the eukaryotic replication fork involves binding and stimulation of FEN-1 by proliferating cell nuclear antigen. J. Biol. Chem. 270, 22109-22112 (1995).
[1868] 51. Tom, S., Henricksen, L. A. & Bambara, R. A. Mechanism whereby proliferating cell nuclear antigen stimulates flap endonuclease 1. J. Biol. Chem. 275, 10498-10505 (2000).
[1869] 52. Tanenbaum, M. E., Gilbert, L. A., Qi, L. S., Weissman, J. S. & Vale, R. D. A protein-tagging system for signal amplification in gene expression and fluorescence imaging. Cell 159, 635-646 (2014).
[1870] 53. Bertrand, E. et al. Localization of ASH1 mRNA particles in living yeast. Mol. Cell 2, 437-445 (1998).
[1871] 54. Dahlman, J. E. et al. Orthogonal gene knockout and activation with a catalytically active Cas9 nuclease. Nat. Biotechnol. 33, 1159-1161 (2015).
[1872] 55. Tsai, S. Q. et al. GUIDE-seq enables genome-wide profiling of off-target cleavage by CRISPR-Cas nucleases. Nat. Biotechnol. 33, 187-197 (2015).
[1873] 56. Tsai, S. Q. et al. CIRCLE-seq: a highly sensitive in vitro screen for genome-wide CRISPR-Cas9 nuclease off-targets. Nat. Methods 14, 607-614 (2017).
[1874] 57. Schek N, Cooke C, Alwine J C. Molecular and Cellular Biology. (1992).
[1875] 58. Gil A, Proudfoot N J. Cell. (1987).
[1876] 59. Zhao, B. S., Roundtree, I. A., He, C. Nat Rev Mol Cell Biol. (2017).
[1877] 60. Rubio, M. A. T., Hopper, A. K. Wiley Interdiscip Rev RNA (2011).
[1878] 61. Shechner, D. M., Hacisuleyman E., Younger, S. T., Rinn, J. L. Nat Methods. (2015).
[1879] 62. Paige, J. S., Wu, K. Y., Jaffrey, S. R. Science (2011).
[1880] 63. Ray D., . . . Hughes T R. Nature (2013).
[1881] 64. Chadalavada, D. M., Cerrone-Szakal, A. L., Bevilacqua, P. C. RNA (2007).
[1882] 65. Forster A C, Symons R H. Cell. (1987).
[1883] 66. Weinberg Z, Kim P B, Chen T H, Li S, Harris K A, Lünse CE, Breaker R R. Nat. Chem. Biol. (2015).
[1884] 67. Feldstein P A, Buzayan J M, Bruening G. Gene (1989).
[1885] 68. Saville B J, Collins R A. Cell. (1990).
[1886] 69. Winkler W C, Nahvi A, Roth A, Collins J A, Breaker R R. Nature (2004).
[1887] 70. Roth A, Weinberg Z, Chen A G, Kim P G, Ames T D, Breaker R R. Nat Chem Biol. (2013).
[1888] 71. Choudhury R, Tsai Y S, Dominguez D, Wang Y, Wang Z. Nat Commun. (2012).
[1889] 72. MacRae I J, Doudna J A. Curr Opin Struct Biol. (2007).
[1890] 73. Bernstein E, Caudy A A, Hammond S M, Hannon G J Nature (2001).
[1891] 74. Filippov V, Solovyev V, Filippova M, Gill S S. Gene (2000).
[1892] 75. Cadwell R C and Joyce G F. PCR Methods Appl. (1992).
[1893] 76. McInerney P, Adams P, and Hadi M Z. Mol Biol Int. (2014).
[1894] 77. Esvelt K M, Carlson J C, and Liu D R. Nature. (2011).
[1895] 78. Naorem S S, Hin J, Wang S, Lee W R, Heng X, Miller J F, Guo H. Proc Natl Acad Sci USA (2017).
[1896] 79. Martinez M A, Vartanian J P, Wain-Hobson S. Proc Natl Acad Sci USA (1994).
[1897] 80. Meyer A J, Ellefson J W, Ellington A D. Curr Protoc Mol Biol. (2014).
[1898] 81. Wang H H, Isaacs F J, Carr P A, Sun Z Z, Xu G, Forest C R, Church G M. Nature. (2009).
[1899] 82. Nyerges A et al. Proc Natl Acad Sci USA. (2016).
[1900] 83. Mascola J R, Haynes B F. Immunol Rev. (2013).
[1901] 84. X. Wen, K. Wen, D. Cao, G. Li, R. W. Jones, J. Li, S. Szu, Y. Hoshino, L. Yuan, Inclusion of a universal tetanus toxoid CD4(+) T cell epitope P2 significantly enhanced the immunogenicity of recombinant rotavirus ΔVP8* subunit parenteral vaccines. Vaccine 32, 4420-4427 (2014).
[1902] 85. G. Ada, D. Isaacs, Carbohydrate-protein conjugate vaccines. Clin Microbiol Infect 9, 79-85 (2003).
[1903] 86. E. Malito, B. Bursulaya, C. Chen, P. L. Surdo, M. Picchianti, E. Balducci, M. Biancucci, A. Brock, F. Berti, M. J. Bottomley, M. Nissum, P. Costantino, R. Rappuoli, G. Spraggon, Structural basis for lack of toxicity of the diphtheria toxin mutant CRM197. Proceedings of the National Academy of Sciences 109, 5229 (2012).
[1904] 87. J. de Wit, M. E. Emmelot, M. C. M. Poelen, J. Lanfermeijer, W. G. H. Han, C. van Els, P. Kaaijk, The Human CD4(+) T Cell Response against Mumps Virus Targets a Broadly Recognized Nucleoprotein Epitope. J Virol 93, (2019).
[1905] 88. M. May, C. A. Rieder, R. J. Rowe, Emergent lineages of mumps virus suggest the need for a polyvalent vaccine. Int J Infect Dis 66,1-4 (2018).
[1906] 89. M. Ramamurthy, P. Rajendiran, N. Saravanan, S. Sankar, S. Gopalan, B. Nandagopal, Identification of immunogenic B-cell epitope peptides of rubella virus E1 glycoprotein towards development of highly specific immunoassays and/or vaccine. Conference Abstract, (2019).
[1907] 90. U. S. F. Tambunan, F. R. P. Sipahutar, A. A. Parikesit, D. Kerami, Vaccine Design for H5N1 Based on B- and T-cell Epitope Predictions. Bioinform Biol Insights 10,27-35 (2016).
[1908] 91. Asante, E A. et. al. “A naturally occurring variant of the human prion protein completely prevents prion disease”. Nature. (2015).
[1909] 92. Crabtree, G. R. & Schreiber, S. L. Three-part inventions: intracellular signaling and induced proximity. Trends Biochem. Sci. 21, 418-22 (1996).
[1910] 93. Liu, J. et al. Calcineurin Is a Common Target of A and FKBP-FK506 Complexes. Cell 66, 807-815 (1991).
[1911] 94. Keith, C. T. et al. A mammalian protein targeted by G1-arresting rapamycin-receptor complex. Nature 369, 756-758 (2003).
[1912] 95. Spencer, D. M., Wandless, T. J., Schreiber, S. L. S. & Crabtree, G. R. Controlling signal transduction with synthetic ligands. Science 262, 1019-24 (1993).
[1913] 96. Pruschy, M. N. et al. Mechanistic studies of a signaling pathway activated by the organic dimerizer FK1012. Chem. Biol. 1, 163-172 (1994).
[1914] 97. Spencer, D. M. et al. Functional analysis of Fas signaling in vivo using synthetic inducers of dimerization. Curr. Biol. 6, 839-847 (1996).
[1915] 98. Belshaw, P. J., Spencer, D. M., Crabtree, G. R. & Schreiber, S. L. Controlling programmed cell death with a cyclophilin-cyclosporin-based chemical inducer of dimerization. Chem. Biol. 3, 731-738 (1996).
[1916] 99. Yang, J. X., Symes, K., Mercola, M. & Schreiber, S. L. Small-molecule control of insulin and PDGF receptor signaling and the role of membrane attachment. Curr. Biol. 8, 11-18 (1998).
[1917] 100. Belshaw, P. J., Ho, S. N., Crabtree, G. R. & Schreiber, S. L. Controlling protein association and subcellular localization with a synthetic ligand that induces heterodimerization of proteins. Proc. Natl. Acad. Sci. 93, 4604-4607 (2002).
[1918] 101. Stockwell, B. R. & Schreiber, S. L. Probing the role of homomeric and heteromeric receptor interactions in TGF-β signaling using small molecule dimerizers. Curr. Biol. 8, 761-773 (2004).
[1919] 102. Spencer, D. M., Graef, I., Austin, D. J., Schreiber, S. L. & Crabtree, G. R. A general strategy for producing conditional alleles of Src-like tyrosine kinases. Proc. Natl. Acad. Sci. 92, 9805-9809 (2006).
[1920] 103. Holsinger, L. J., Spencer, D. M., Austin, D. J., Schreiber, S. L. & Crabtree, G. R. Signal transduction in T lymphocytes using a conditional allele of Sos. Proc. Natl. Acad. Sci. 92, 9810-9814 (2006).
[1921] 104. Myers, M. G. Insulin Signal Transduction and the IRS Proteins. Annu. Rev. Pharmacol. Toxicol. 36, 615-658 (1996).
[1922] 105. Watowich, S. S. The erythropoietin receptor: Molecular structure and hematopoietic signaling pathways. J. Investig. Med. 59, 1067-1072 (2011).
[1923] 106. Blau, C. A., Peterson, K. R., Drachman, J. G. & Spencer, D. M. A proliferation switch for genetically modified cells. Proc. Natl. Acad. Sci. 94, 3076-3081 (2002).
[1924] 107. Clackson, T. et al. Redesigning an FKBP-ligand interface to generate chemical dimerizers with novel specificity. Proc. Natl. Acad. Sci. 95, 10437-10442 (1998).
[1925] 108. Diver, S. T. & Schreiber, S. L. Single-step synthesis of cell-permeable protein dimerizers that activate signal transduction and gene expression. J. Am. Chem. Soc. 119, 5106-5109 (1997).
[1926] 109. Guo, Z. F., Zhang, R. & Liang, F. Sen. Facile functionalization of FK506 for biological studies by the thiol-ene ‘click’ reaction. RSC Adv. 4, 11400-11403 (2014).
[1927] 110. Robinson, D. R., Wu, Y.-M. & Lin, S.-F. The protein tyrosine kinase family of the human genome. Oncogene 19, 5548-5557 (2000).
[1928] 111. Landrum, M. J. et al. ClinVar: public archive of interpretations of clinically relevant variants. Nucleic Acids Res. 44, D862-D868 (2016).
[1929] 112. Jinek, M. et al. A Programmable Dual-RNA-Guided DNA Endonuclease in Adaptive Bacterial Immunity. Science 337, 816-821 (2012).
[1930] 113. Cong, L. et al. Multiplex Genome Engineering Using CRISPR/Cas Systems. Science 339, 819-823 (2013).
[1931] 114. Mali, P. et al. RNA-Guided Human Genome Engineering via Cas9. Science 339, 823-826 (2013).
[1932] 115. Yang, H. et al. One-Step Generation of Mice Carrying Reporter and Conditional Alleles by CRISPR/Cas-Mediated Genome Engineering. Cell 154, 1370-1379 (2013).
[1933] 116. Kim, S., Kim, D., Cho, S. W., Kim, J. & Kim, J.-S. Highly efficient RNA-guided genome editing in human cells via delivery of purified Cas9 ribonucleoproteins. Genome Res. 24, 1012-1019 (2014).
[1934] 117. Orlando, S. J. et al. Zinc-finger nuclease-driven targeted integration into mammalian genomes using donors with limited chromosomal homology. Nucleic Acids Res. 38, e152-e152 (2010).
[1935] 118. Tsai, S. Q. et al. GUIDE-seq enables genome-wide profiling of off-target cleavage by CRISPR-Cas nucleases. Nat. Biotechnol. 33, 187-197 (2015).
[1936] 119. Suzuki, K. et al. In vivo genome editing via CRISPR/Cas9 mediated homology-independent targeted integration. Nature 540, 144-149 (2016).
[1937] 120. Kosicki, M., Tomberg, K. & Bradley, A. Repair of double-strand breaks induced by CRISPR-Cas9 leads to large deletions and complex rearrangements. Nat. Biotechnol. 36, 765-771 (2018).
[1938] 121. Haapaniemi, E., Botla, S., Persson, J., Schmierer, B. & Taipale, J. CRISPR-Cas9 genome editing induces a p53-mediated DNA damage response. Nat. Med. 24, 927-930 (2018).
[1939] 122. Ihry, R. J. et al. p53 inhibits CRISPR-Cas9 engineering in human pluripotent stem cells. Nat. Med. 24, 939-946 (2018).
[1940] 123. Chapman, J. R., Taylor, M. R. G. & Boulton, S. J. Playing the end game: DNA double-strand break repair pathway choice. Mol. Cell 47, 497-510 (2012).
[1941] 124. Cox, D. B. T., Platt, R. J. & Zhang, F. Therapeutic genome editing: prospects and challenges. Nat. Med. 21, 121-131 (2015).
[1942] 125. Paquet, D. et al. Efficient introduction of specific homozygous and heterozygous mutations using CRISPR/Cas9. Nature 533, 125-129 (2016).
[1943] 126. Chu, V. T. et al. Increasing the efficiency of homology-directed repair for CRISPR-Cas9-induced precise gene editing in mammalian cells. Nat. Biotechnol. 33, 543-548 (2015).
[1944] 127. Maruyama, T. et al. Increasing the efficiency of precise genome editing with CRISPR-Cas9 by inhibition of nonhomologous end joining. Nat. Biotechnol. 33, 538-542 (2015).
[1945] 128. Rees, H. A., Yeh, W.-H. & Liu, D. R. Development of hRad51—Cas9 nickase fusions that mediate HDR without double-stranded breaks. Nat. Commun. 10, 1-12 (2019).
[1946] 129. Komor, A. C., Kim, Y. B., Packer, M. S., Zuris, J. A. & Liu, D. R. Programmable editing of a target base in genomic DNA without double-stranded DNA cleavage. Nature 533, 420-424 (2016).
[1947] 130. Gaudelli, N. M. et al. Programmable base editing of A●T to G●C in genomic DNA without DNA cleavage. Nature 551, 464-471 (2017).
[1948] 131. Gao, X. et al. Treatment of autosomal dominant hearing loss by in vivo delivery of genome editing agents. Nature 553, 217-221 (2018).
[1949] 132. Ingram, V. M. A specific chemical difference between the globins of normal human and sickle-cell anaemia haemoglobin. Nature 178, 792-794 (1956).
[1950] 133. Myerowitz, R. & Costigan, F. C. The major defect in Ashkenazi Jews with Tay-Sachs disease is an insertion in the gene for the alpha-chain of beta-hexosaminidase. J. Biol. Chem. 263, 18587-18589 (1988).
[1951] 134. Zielenski, J. Genotype and Phenotype in Cystic Fibrosis. Respiration 67, 117-133 (2000).
[1952] 135. Mead, S. et al. A Novel Protective Prion Protein Variant that Colocalizes with Kuru Exposure. N. Engl. J. Med. 361, 2056-2065 (2009).
[1953] 136. Marraffini, L. A. & Sontheimer, E. J. CRISPR interference limits horizontal gene transfer in staphylococci by targeting DNA. Science 322, 1843-1845 (2008).
[1954] 137. Barrangou, R. et al. CRISPR provides acquired resistance against viruses in prokaryotes. Science 315, 1709-1712 (2007).
[1955] 138. Jiang, F. & Doudna, J. A. CRISPR-Cas9 Structures and Mechanisms. Annu. Rev. Biophys. 46, 505-529 (2017).
[1956] 139. Hille, F. et al. The Biology of CRISPR-Cas: Backward and Forward. Cell 172, 1239-1259 (2018).
[1957] 140. Luan, D. D., Korman, M. H., Jakubczak, J. L. & Eickbush, T. H. Reverse transcription of R2Bm RNA is primed by a nick at the chromosomal target site: a mechanism for non-LTR retrotransposition. Cell 72, 595-605 (1993).
[1958] 141. Liu, Y., Kao, H.-I. & Bambara, R. A. Flap endonuclease 1: a central component of DNA metabolism. Annu. Rev. Biochem. 73, 589-615 (2004).
[1959] 142. Rees, H. A. & Liu, D. R. Base editing: precision chemistry on the genome and transcriptome of living cells. Nat. Rev. Genet. 19, 770 (2018).
[1960] 143. Richardson, C. D., Ray, G. J., DeWitt, M. A., Curie, G. L. & Corn, J. E. Enhancing homology-directed genome editing by catalytically active and inactive CRISPR-Cas9 using asymmetric donor DNA. Nat. Biotechnol. 34, 339-344 (2016).
[1961] 144. Qi, L. S. et al. Repurposing CRISPR as an RNA-Guided Platform for Sequence-Specific Control of Gene Expression. Cell 152, 1173-1183 (2013).
[1962] 145. Shechner, D. M., Hacisuleyman, E., Younger, S. T. & Rinn, J. L. Multiplexable, locus-specific targeting of long RNAs with CRISPR-Display. Nat. Methods 12, 664-670 (2015).
[1963] 146. Tang, W., Hu, J. H. & Liu, D. R. Aptazyme-embedded guide RNAs enable ligand-responsive genome editing and transcriptional activation. Nat. Commun. 8, 15939 (2017).
[1964] 147. Jinek, M. et al. Structures of Cas9 Endonucleases Reveal RNA-Mediated Conformational Activation. Science 343, 1247997 (2014).
[1965] 148. Nishimasu, H. et al. Crystal Structure of Cas9 in Complex with Guide RNA and Target DNA. Cell 156, 935-949 (2014).
[1966] 149. Jiang, F., Zhou, K., Ma, L., Gressel, S. & Doudna, J. A. A Cas9-guide RNA complex preorganized for target DNA recognition. Science 348, 1477-1481 (2015).
[1967] 150. Baranauskas, A. et al. Generation and characterization of new highly thermostable and processive M-MuLV reverse transcriptase variants. Protein Eng. Des. Sel. 25, 657-668 (2012).
[1968] 151. Gerard, G. F. et al. The role of template-primer in protection of reverse transcriptase from thermal inactivation. Nucleic Acids Res. 30, 3118-3129 (2002).
[1969] 152. Arezi, B. & Hogrefe, H. Novel mutations in Moloney Murine Leukemia Virus reverse transcriptase increase thermostability through tighter binding to template-primer. Nucleic Acids Res. 37, 473-481 (2009).
[1970] 153. Kotewicz, M. L., Sampson, C. M., D'Alessio, J. M. & Gerard, G. F. Isolation of cloned Moloney murine leukemia virus reverse transcriptase lacking ribonuclease H activity. Nucleic Acids Res. 16, 265-277 (1988).
[1971] 154. Shen, M. W. et al. Predictable and precise template-free CRISPR editing of pathogenic variants. Nature 563, 646-651 (2018).
[1972] 155. Thuronyi, B. W. et al. Continuous evolution of base editors with expanded target compatibility and improved activity. Nat. Biotechnol. (2019). doi:10.1038/s41587-019-0193-0
[1973] 156. Kim, Y. B. et al. Increasing the genome-targeting scope and precision of base editing with engineered Cas9-cytidine deaminase fusions. Nat. Biotechnol. 35, 371-376 (2017).
[1974] 157. Koblan, L. W. et al. Improving cytidine and adenine base editors by expression optimization and ancestral reconstruction. Nat. Biotechnol. (2018). doi:10.1038/nbt.4172
[1975] 158. Komor, A. C. et al. Improved base excision repair inhibition and bacteriophage Mu Gam protein yields C:G-to-T:A base editors with higher efficiency and product purity. Sci. Adv. 3, eaao4774 (2017).
[1976] 159. Kleinstiver, B. P. et al. High-fidelity CRISPR-Cas9 nucleases with no detectable genome-wide off-target effects. Nature 529, 490-495 (2016).
[1977] 160. Zuo, E. et al. Cytosine base editor generates substantial off-target single-nucleotide variants in mouse embryos. Science 364, 289-292 (2019).
[1978] 161. Jin, S. et al. Cytosine, but not adenine, base editors induce genome-wide off-target mutations in rice. Science 364, 292-295 (2019).
[1979] 162. Kim, D., Kim, D., Lee, G., Cho, S.-I. & Kim, J.-S. Genome-wide target specificity of CRISPR RNA-guided adenine base editors. Nat. Biotechnol. 37, 430-435 (2019).
[1980] 163. Grünewald, J. et al. Transcriptome-wide off-target RNA editing induced by CRISPR-guided DNA base editors. Nature 569, 433-437 (2019).
[1981] 164. Zhou, C. et al. Off-target RNA mutation induced by DNA base editing and its elimination by mutagenesis. Nature 571, 275-278 (2019).
[1982] 165. Rees, H. A., Wilson, C., Doman, J. L. & Liu, D. R. Analysis and minimization of cellular RNA editing by DNA adenine base editors. Sci. Adv. 5, eaax5717 (2019).
[1983] 166. Ostertag, E. M. & Kazazian Jr, H. H. Biology of Mammalian L1 Retrotransposons. Annu. Rev. Genet. 35, 501-538 (2001).
[1984] 167. Griffiths, D. J. Endogenous retroviruses in the human genome sequence. Genome Biol. 2, REVIEWS1017 (2001).
[1985] 168. Berkhout, B., Jebbink, M. & Zsíros, J. Identification of an Active Reverse Transcriptase Enzyme Encoded by a Human Endogenous HERV-K Retrovirus. J. Virol. 73, 2365-2375 (1999).
[1986] 169. Halvas, E. K., Svarovskaia, E. S. & Pathak, V. K. Role of Murine Leukemia Virus Reverse Transcriptase Deoxyribonucleoside Triphosphate-Binding Site in Retroviral Replication and In Vivo Fidelity. J. Virol. 74, 10349-10358 (2000).
[1987] 170. Dever, D. P. et al. CRISPR/Cas9 Beta-globin Gene Targeting in Human Hematopoietic Stem Cells. Nature 539, 384-389 (2016).
[1988] 171. Park, S. H. et al. Highly efficient editing of the β-globin gene in patient-derived hematopoietic stem and progenitor cells to treat sickle cell disease. Nucleic Acids Res. doi:10.1093/nar/gkz475
[1989] 172. Collinge, J. Prion diseases of humans and animals: their causes and molecular basis. Annu. Rev. Neurosci. 24, 519-550 (2001).
[1990] 173. Asante, E. A. et al. A naturally occurring variant of the human prion protein completely prevents prion disease. Nature 522, 478-481 (2015).
[1991] 174. Anzalone, A. V., Lin, A. J., Zairis, S., Rabadan, R. & Cornish, V. W. Reprogramming eukaryotic translation with ligand-responsive synthetic RNA switches. Nat. Methods 13, 453-458 (2016).
[1992] 175. Badran, A. H. et al. Continuous evolution of Bacillus thuringiensis toxins overcomes insect resistance. Nature 533, 58-63 (2016).
[1993] 176. Anders, C. & Jinek, M. Chapter One—In Vitro Enzymology of Cas9. in Methods in Enzymology (eds. Doudna, J. A. & Sontheimer, E. J.) 546, 1-20 (Academic Press, 2014).
[1994] 177. Pirakitikulr, N., Ostrov, N., Peralta-Yahya, P. & Cornish, V. W. PCRless library mutagenesis via oligonucleotide recombination in yeast. Protein Sci. Publ. Protein Soc. 19, 2336-2346 (2010).
[1995] 178. Clement, K. et al. CRISPResso2 provides accurate and rapid genome editing sequence analysis. Nat. Biotechnol. 37, 224-226 (2019).
[1996] 179. Tsai, S. Q. et al. GUIDE-seq enables genome-wide profiling of off-target cleavage by CRISPR-Cas nucleases. Nat. Biotechnol. 33, 187-197 (2015).
[1997] 180. Kleinstiver, B. P. et al. High-fidelity CRISPR-Cas9 nucleases with no detectable genome-wide off-target effects. Nature 529, 490-495 (2016).
[1998] 181. Koblan, L. W. et al. Improving cytidine and adenine base editors by expression optimization and ancestral reconstruction. Nat. Biotechnol. (2018). doi:10.1038/nbt.4172
[1999] 182. Baranauskas, A. et al. Generation and characterization of new highly thermostable and processive M-MuLV reverse transcriptase variants. Protein Eng. Des. Sel. 25, 657-668 (2012).
[2000] 183. Schechner, DM, Hacisuleyman E., Younger S T, Rinn J L. Nat Methods 664-70 (2015).
[2001] 184. Brown J A, et al. Nat Struct Mol Biol 633-40 (2014).
[2002] 185. Conrad N A and Steitz J A. EMBO J 1831-41 (2005).
[2003] 186. Bartlett J S, et al. Proc Natl Acad Sci USA 8852-7 (1996).
[2004] 187. Mitton-Fry R M, DeGregorio S J, Wang J, Steitz T A, Steitz J A. Science 1244-7 (2010).
[2005] 188. Forster A C, Symons R H. Cell. 1987.
[2006] 189. Weinberg Z, Kim P B, Chen T H, Li S, Harris K A, Lünse CE, Breaker R R. Nat. Chem. Biol. 2015.
[2007] 190. Feldstein P A, Buzayan J M, Bruening G. Gene 1989.
[2008] 191. Saville B J, Collins R A. Cell. 1990.
[2009] 192. Roth A, Weinberg Z, Chen A G, Kim P G, Ames T D, Breaker R R. Nat Chem Biol. 2013.
[2010] 193. Borchardt E K, et al. RNA 1921-30 (2015).
[2011] 194. Zhang Y, et al. Mol Cell 792-806 (2013).
[2012] 195. Dang Y, et al. Genome Biol 280 (2015).
[2013] 196. Schaefer M, Kapoor U, and Jantsch M F. Open Biol 170077 (2017).
[2014] 197. Nahar S, et al. Chem Comm 2377-80 (2018).
[2015] 198. Gao Y and Zhao Y. J Integr Plant Biol 343-9 (2014).
[2016] 199. Dubois N, Marquet R, Paillart J, Bernacchi S. Front Microbiol 527 (2018).
[2017] 200. Costa M and Michel F. EMBO J 1276-85 (1995).
[2018] 201. Hu J H, et al. Nature 57-63 (2018).
[2019] 202. Furukawa K, Gu H, Breaker R R. Methods Mol Biol 209-20 (2014).
[2020] 203. Zettler, J., Schütz, V. & Mootz, H. D. The naturally split Npu DnaE intein exhibits an extraordinarily high rate in the protein trans-splicing reaction. FEBS Lett. 583, 909-914 (2009).
[2021] 204. Kügler, S., Kilic, E. & Bahr, M. Human synapsin 1 gene promoter confers highly neuron-specific long-term transgene expression from an adenoviral vector in the adult rat brain depending on the transduced area. Gene Ther. 10, 337-347 (2003).
[2022] 205. de Felipe, P., Hughes, L. E., Ryan, M. D. & Brown, J. D. Co-translational, intraribosomal cleavage of polypeptides by the foot-and-mouth disease virus 2A peptide. J. Biol. Chem. 278, 11441-11448 (2003).
[2023] 206. Levy, J. M. & Nicoll, R. A. Membrane-associated guanylate kinase dynamics reveal regional and developmental specificity of synapse stability. J. Physiol. 595, 1699-1709 (2017).
[2024] 207. Li, B. & Dewey, C. N. RSEM: accurate transcript quantification from RNA-Seq data with or without a reference genome. BMC Bioinformatics 12, 323 (2011).
[2025] 208. Ritchie, M. E. et al. limma powers differential expression analyses for RNA-sequencing and microarray studies. Nucleic Acids Res. 43, e47-e47 (2015).

### EMBODIMENTS

[2026] The following embodiments are within the scope of the present disclosure. Furthermore, the disclosure encompasses all variations, combinations, and permutations of these embodiments in which one or more limitations, elements, clauses, and descriptive terms from one or more of the listed embodiments is introduced into another listed embodiment in this section. For example, any listed embodiment that is dependent on another embodiment can be modified to include one or more limitations found in any other listed embodiment in this section that is dependent on the same base embodiment. Where elements are presented as lists, e.g., in Markush group format, each subgroup of the elements is also disclosed, and any element(s) can be removed from the group. It should it be understood that, in general, where the disclosure, or aspects of the disclosure, is/are referred to as comprising particular elements and/or features, certain embodiments of the invention or aspects of the invention consist, or consist essentially of, such elements and/or features. It is also noted that the terms “comprising” and “containing” are intended to be open and permits the inclusion of additional elements or steps. Where ranges are given, endpoints are included. Furthermore, unless otherwise indicated or otherwise evident from the context and understanding of one of ordinary skill in the art, values that are expressed as ranges can assume any specific value or sub-range within the stated ranges in different embodiments of the invention, to the tenth of the unit of the lower limit of the range, unless the context clearly dictates otherwise.

### Group 1. Embodiments 1-212

[2027] 1. A fusion protein comprising a nucleic acid programmable DNA binding protein (napDNAbp) and a reverse transcriptase.
2. The fusion protein of embodiment 1, wherein the fusion protein is capable of carrying out genome editing by target-primed reverse transcription in the presence of an extended guide RNA.
3. The fusion protein of embodiment 1, wherein the napDNAbp has a nickase activity.
4. The fusion protein of embodiment 1, wherein the napDNAbp is a Cas9 protein or variant thereof.
5. The fusion protein of embodiment 1, wherein the napDNAbp is a nuclease active Cas9, a nuclease inactive Cas9 (dCas9), or a Cas9 nickase (nCas9).
6. The fusion protein of embodiment 1, wherein the napDNAbp is Cas9 nickase (nCas9).
7. The fusion protein of embodiment 1, wherein the napDNAbp is selected from the group consisting of: Cas9, CasX, CasY, Cpf1, C2c1, C2c2, C2C3, and Argonaute and optionally has a nickase activity.
8. The fusion protein of embodiment 1, wherein the fusion protein when complexed with an extended guide RNA is capable of binding to a target DNA sequence.
9. The fusion protein of embodiment 8, wherein the target DNA sequence comprises a target strand and a complementary non-target strand.
10. The fusion protein of embodiment 8, wherein the binding of the fusion protein complexed to the extended guide RNA forms an R-loop.
11. The fusion protein of embodiment 10, wherein the R-loop comprises (i) an RNA-DNA hybrid comprising the extended guide RNA and the target strand, and (ii) the complementary non-target strand.
12. The fusion protein of embodiment 11, wherein the complementary non-target strand is nicked to form a reverse transcriptase priming sequence having a free 3′ end.
13. The fusion protein of embodiment 2, wherein the extended guide RNA comprises (a) a guide RNA, and (b) an RNA extension at the 5′ or the 3′ end of the guide RNA, or at an intramolecular location in the guide RNA.
14. The fusion protein of embodiment 13, wherein the RNA extension comprises (i) a reverse transcription template sequence comprising a desired nucleotide change, (ii) a reverse transcription primer binding site, and (iii) optionally, a linker sequence.
15. The fusion protein of embodiment 14, wherein the reverse transcription template sequence encodes a single-strand DNA flap that is complementary to an endogenous DNA sequence adjacent to the nick site, wherein the single-strand DNA flap comprises the desired nucleotide change.
16. The fusion protein of embodiment 13, wherein the RNA extension is at least 5 nucleotides, at least 6 nucleotides, at least 7 nucleotides, at least 8 nucleotides, at least 9 nucleotides, at least 10 nucleotides, at least 11 nucleotides, at least 12 nucleotides, at least 13 nucleotides, at least 14 nucleotides, at least 15 nucleotides, at least 16 nucleotides, at least 17 nucleotides, at least 18 nucleotides, at least 19 nucleotides, at least 20 nucleotides, at least 21 nucleotides, at least 22 nucleotides, at least 23 nucleotides, at least 24 nucleotides, or at least 25 nucleotides in length.
17. The fusion protein of embodiment 15, wherein the single-strand DNA flap hybridizes to the endogenous DNA sequence adjacent to the nick site, thereby installing the desired nucleotide change.
18. The fusion protein of embodiment 15, wherein the single-stranded DNA flap displaces the endogenous DNA sequence adjacent to the nick site and which has a free 5′ end.
19. The fusion protein of embodiment 18, wherein the endogenous DNA sequence having the 5′ end is excised by the cell.
20. The fusion protein of embodiment 18, wherein cellular repair of the single-strand DNA flap results in installation of the desired nucleotide change, thereby forming a desired product.
21. The fusion protein of embodiment 14, wherein the desired nucleotide change is installed in an editing window that is between about −4 to +10 of the PAM sequence, or between about −10 to +20 of the PAM sequence, or between about −20 to +40 of the PAM sequence, or between about −30 to +100 of the PAM sequence, or wherein the desired nucleotide change is installed at least 1, 2, 3, 4, 5, 6, 7, 8, 9, 10, 11, 12, 13, 14, 15, 16, 17, 18, 19, 20, 21, 22, 23, 24, 25, 26, 27, 28, 29, 30, 31, 32, 33, 34, 35, 36, 37, 38, 39, 40, 41, 42, 43, 44, 45, 46, 47, 48, 49, 50, 51, 52, 53, 54, 55, 56, 57, 58, 59, 60, 61, 62, 63, 64, 65, 66, 67, 68, 69, 70, 71, 72, 73, 74, 75, 76, 77, 78, 79, 80, 81, 82, 83, 84, 85, 86, 87, 88, 89, 90, 91, 92, 93, 94, 95, 96, 97, 98, 99, or 100 nucleotides downstream of the nick site.
22. The fusion protein of embodiment 1, wherein the napDNAbp comprises an amino acid sequence of SEQ ID NO: 18, or an amino acid sequence that is at least 80%, 85%, 90%, 95%, 98%, or 99% identical to the amino acid sequence to SEQ ID NO: 18.
23. The fusion protein of embodiment 1, wherein the napDNAbp comprises an amino acid sequence that is at least 80%, 85%, 90%, 95%, 98%, or 99% identical to the amino acid sequence of any one of SEQ ID NOs: 18-88, 126, 130, 137, 141, 147, 153, 157, 445, 460, 467, and 482-487.
24. The fusion protein of embodiment 1, wherein the reverse transcriptase comprises any one of the amino acid sequences of SEQ ID NOs: 89-100, 105-122, 128-129, 132, 139, 143, 149, 154, 159, 235, 454, 471, 516, 662, 700, 701-716, 739-741, and 766.
25. The fusion protein of embodiment 1, wherein the reverse transcriptase comprises an amino acid sequence that is at least 80%, 85%, 90%, 95%, 98%, or 99% identical to the amino acid sequence of any one of SEQ ID NOs: 89-100, 105-122, 128-129, 132, 139, 143, 149, 154, 159, 235, 454, 471, 516, 662, 700, 701-716, 739-741, and 766.
26. The fusion protein of embodiment 1, wherein the reverse transcriptase is a naturally-occurring reverse transcriptase from a retrovirus or a retrotransposon.
27. The fusion protein of any one of the previous embodiments, wherein the fusion protein comprises the structure NH₂-[napDNAbp]-[reverse transcriptase]-COOH; or NH₂-[reverse transcriptase]-[napDNAbp]-COOH, wherein each instance of “]-[” indicates the presence of an optional linker sequence.
28. The fusion protein of embodiment 27, wherein the linker sequence comprises an amino acid sequence of SEQ ID NOs: 127, 165-176, 446, 453, and 767-769.
29. The fusion protein of embodiment 14, wherein the desired nucleotide change is a single nucleotide change, an insertion of one or more nucleotides, or a deletion of one or more nucleotides.
30. The fusion protein of embodiment 29, wherein the insert or deletion is at least 1, at least 2, at least 3, at least 4, at least 5, at least 6, at least 7, at least 8, at least 9, at least 10, at least 11, at least 12, at least 13, at least 14, at least 15, at least 16, at least 17, at least 18, at least 19, at least 20, at least 21, at least 22, at least 23, at least 24, at least 25, at least 26, at least 27, at least 28, at least 29, at least 30, at least 31, at least 32, at least 33, at least 34, at least 35, at least 36, at least 37, at least 38, at least 39, at least 40, at least 41, at least 42, at least 43, at least 44, at least 45, at least 46, at least 47, at least 48, at least 49, or at least 50.
31. An extended guide RNA comprising a guide RNA and at least one RNA extension.
32. The extended guide RNA of embodiment 1, wherein the RNA extension is position at the 3′ or 5′ end of the guide RNA, or at an intramolecular position in the guide RNA.
33. The extended guide RNA of embodiment 31, wherein the extended guide RNA is capable of binding to a napDNAbp and directing the napDNAbp to a target DNA sequence.
34. The extended guide RNA of embodiment 33, wherein the target DNA sequence comprises a target strand and a complementary non-target strand, wherein the guide RNA hybridizes to the target strand to form an RNA-DNA hybrid and an R-loop.
35. The extended guide RNA of embodiment 31, wherein the at least one RNA extension comprises (i) a reverse transcription template sequence, (ii) a reverse transcription primer binding site, and (iii) optionally a linker sequence.
36. The extended guide RNA of embodiment 35, wherein the RNA extension is at least 5 nucleotides, at least 6 nucleotides, at least 7 nucleotides, at least 8 nucleotides, at least 9 nucleotides, at least 10 nucleotides, at least 11 nucleotides, at least 12 nucleotides, at least 13 nucleotides, at least 14 nucleotides, at least 15 nucleotides, at least 16 nucleotides, at least 17 nucleotides, at least 18 nucleotides, at least 19 nucleotides, at least 20 nucleotides, at least 21 nucleotides, at least 22 nucleotides, at least 23 nucleotides, at least 24 nucleotides, or at least 25 nucleotides in length.
37. The extended guide RNA of embodiment 35, wherein the reverse transcription template sequence is at least 3 nucleotides, at least 4 nucleotides, at least 5 nucleotides, at least 6 nucleotides, at least 7 nucleotides, at least 8 nucleotides, at least 9 nucleotides, at least 10 nucleotides, at least 11 nucleotides, at least 12 nucleotides, at least 13 nucleotides, at least 14 nucleotides, or at least 15 nucleotides in length.
38. The extended guide RNA of embodiment 35, wherein the reverse transcription primer binding site sequence is at least 3 nucleotides, at least 4 nucleotides, at least 5 nucleotides, at least 6 nucleotides, at least 7 nucleotides, at least 8 nucleotides, at least 9 nucleotides, at least 10 nucleotides, at least 11 nucleotides, at least 12 nucleotides, at least 13 nucleotides, at least 14 nucleotides, or at least 15 nucleotides in length.
39. The extended guide RNA of embodiment 35, wherein the optional linker sequence is at least 3 nucleotides, at least 4 nucleotides, at least 5 nucleotides, at least 6 nucleotides, at least 7 nucleotides, at least 8 nucleotides, at least 9 nucleotides, at least 10 nucleotides, at least 11 nucleotides, at least 12 nucleotides, at least 13 nucleotides, at least 14 nucleotides, or at least 15 nucleotides in length.
40. The extended guide RNA of embodiment 35, wherein the reverse transcription template sequence encodes a single-strand DNA flap that is complementary to an endogenous DNA sequence adjacent to a nick site, wherein the single-strand DNA flap comprises a desired nucleotide change.
41. The extended guide RNA of embodiment 40, wherein the single-stranded DNA flap displaces an endogenous single-strand DNA having a 5′ end in the target DNA sequence that has been nicked, and wherein the endogenous single-strand DNA is immediately adjacent downstream of the nick site.
42. The extended guide RNA of embodiment 41, wherein the endogenous single-stranded DNA having the free 5′ end is excised by the cell.
43. The extended guide RNA of embodiment 41, wherein cellular repair of the single-strand DNA flap results in installation of the desired nucleotide change, thereby forming a desired product.
44. The extended guide RNA of embodiment 31, comprising the nucleotide sequence of SEQ ID NOs: 394, 429-442, 641-649, 678-692, 2997-3103, 3113-3121, 3305-3455, 3479-3493, 3522-3556, 3628-3698, and 3755-3810, or a nucleotide sequence having at least 85%, or at least 90%, or at least 95%, or at least 98%, or at least 99% sequence identity with any one of SEQ ID NOs: 394, 429-442, 641-649, 678-692, 2997-3103, 3113-3121, 3305-3455, 3479-3493, 3522-3556, 3628-3698, and 3755-3810.
45. The extended guide RNA of embodiment 35, wherein the reverse transcription template sequence comprises a nucleotide sequence that is at least 80%, or 85%, or 90%, or 95%, or 99% identical to the endogenous DNA target.
46. The extended guide RNA of embodiment 35, wherein the reverse transcription primer binding site hybridizes with a free 3′ end of the cut DNA.
47. The extended guide RNA of embodiment 35, wherein the optional linker sequence is at least 1 nucleotide, or at least 2, at least 3, at least 4, at least 5, at least 6, at least 7, at least 8, at least 9, at least 10, at least 11, at least 12, at least 13, at least 14, or at least 15 nucleotides in length.
48. A complex comprising a fusion protein of any one of embodiments 1-30 and an extended guide RNA.
49. The complex of embodiment 48, wherein the extended guide RNA comprises a guide RNA and an RNA extension at the 3′ or 5′ end of the guide RNA or at an intramolecular position in the guide RNA.
50. The complex of embodiment 48, wherein the extended guide RNA is capable of binding to a napDNAbp and directing the napDNAbp to a target DNA sequence.
51. The complex of embodiment 50, wherein the target DNA sequence comprises a target strand and a complementary non-target strand, wherein the guide RNA hybridizes to the target strand to form an RNA-DNA hybrid and an R-loop.
52. The complex of embodiment 49, wherein the at least one RNA extension comprises (i) a reverse transcription template sequence, (ii) a reverse transcription primer binding site, and (iii) optionally a linker sequence.
53. The complex of embodiment 48, wherein the extended guide RNA comprises the nucleotide sequence of SEQ ID NOs: 18-36, or a nucleotide sequence having at least 85%, or at least 90%, or at least 95%, or at least 98%, or at least 99% sequence identity with any one of SEQ ID NOs: 18-36.
54. The complex of embodiment 52, wherein the reverse transcription template sequence comprises a nucleotide sequence having at least 80%, or 85%, or 90%, or 95%, or 99% sequence identity with the endogenous DNA target.
55. The complex of embodiment 52, wherein the reverse transcription primer binding site hybridizes with a free 3′ end of the cut DNA.
56. A complex comprising comprising a napDNAbp and an extended guide RNA.
57. The complex of embodiment 56, wherein the napDNAbp is a Cas9 nickase.
58. The complex of embodiment 56, wherein the napDNAbp comprises an amino acid sequence of SEQ ID NO: 18, or an amino acid sequence having at least 80%, 85%, 90%, 95%, 98%, or 99% sequence identity with SEQ ID NO: 18.
59. The complex of embodiment 57, wherein the napDNAbp comprises an amino acid sequence having at least 80%, 85%, 90%, 95%, 98%, or 99% sequence identity with the amino acid sequence of any one of SEQ ID NOs: 18-88, 126, 130, 137, 141, 147, 153, 157, 445, 460, 467, and 482-487.
60. The complex of embodiment 57, wherein the extended guide RNA comprises a guide RNA and an RNA extension at the 3′ or 5′ end of the guide RNA, or at an intramolecular position in the guide RNA.
61. The complex of embodiment 57, wherein the extended guide RNA is capable of directing the napDNAbp to a target DNA sequence.
62. The complex of embodiment 61, wherein the target DNA sequence comprises a target strand and a complementary non-target strand, wherein the spacer sequence hybridizes to the target strand to form an RNA-DNA hybrid and an R-loop.
63. The complex of embodiment 61, wherein the RNA extension comprises (i) a reverse transcription template sequence, (ii) a reverse transcription primer binding site, and (iii) optionally a linker sequence.
64. The complex of embodiment 57, wherein the extended guide RNA comprises the nucleotide sequence of SEQ ID NOs: 394, 429-442, 641-649, 678-692, 2997-3103, 3113-3121, 3305-3455, 3479-3493, 3522-3556, 3628-3698, and 3755-3810, or a nucleotide sequence having at least 85%, or at least 90%, or at least 95%, or at least 98%, or at least 99% sequence identity with any one of SEQ ID NOs: 394, 429-442, 641-649, 678-692, 2997-3103, 3113-3121, 3305-3455, 3479-3493, 3522-3556, 3628-3698, and 3755-3810.
65. The complex of embodiment 63, wherein the reverse transcription template sequence comprises a nucleotide sequence that is at least 80%, or 85%, or 90%, or 95%, or 99% identical to the endogenous DNA target.
66. The complex of embodiment 63, wherein the reverse transcription primer binding site hybridizes with a free 3′ end of the cut DNA.
67. The complex of embodiment 63, wherein the optional linker sequence is at least 1 nucleotide, or at least 2, at least 3, at least 4, at least 5, at least 6, at least 7, at least 8, at least 9, at least 10, at least 11, at least 12, at least 13, at least 14, or at least 15 nucleotides in length.
68. A polynucleotide encoding the fusion protein of any of embodiments 1-30.
69. A vector comprising the polynucleotide of embodiment 68.
70. A cell comprising the fusion protein of any of embodiments 1-30 and an extended guide RNA bound to the napDNAbp of the fusion protein.
71. A cell comprising a complex of any one of embodiments 48-67.
72. A pharmaceutical composition comprising: (i) a fusion protein of any of embodiments 1-30, the complex of embodiments 48-67, the polynucleotide of embodiment 68, or the vector of embodiment 69; and (ii) a pharmaceutically acceptable excipient.
73. A pharmaceutical composition comprising: (i) the complex of embodiments 48-67 (ii) reverse transcriptase provided in trans; and (iii) a pharmaceutically acceptable excipient.
74. A kit comprising a nucleic acid construct, comprising: (i) a nuleic acid sequencing encoding the fusion protein of any one of embodiments 1-30; and (ii) a promoter that drives expression of the sequence of (i).
75. A method for installing a desired nucleotide change in a double-stranded DNA sequence, the method comprising:
[2028] (i) contacting the double-stranded DNA sequence with a complex comprising a fusion protein and an extended guide RNA, wherein the fusion protein comprises a napDNAbp and a reverse transcriptase and wherein the extended guide RNA comprises a reverse transcription template sequence comprising the desired nucleotide change;
[2029] (ii) nicking the double-stranded DNA sequence on the non-target strand, thereby generating a free single-strand DNA having a 3′ end;
[2030] (iii) hybridizing the 3′ end of the free single-strand DNA to the reverse transcription template sequence, thereby priming the reverse transcriptase domain;
[2031] (iv) polymerizing a strand of DNA from the 3′ end, thereby generating a single-strand DNA flap comprising the desired nucleotide change;
[2032] (v) replacing an endogenous DNA strand adjacent the cut site with the single-strand DNA flap, thereby installing the desired nucleotide change in the double-stranded DNA sequence.
   76. The method of embodiment 75, wherein the step of (v) replacing comprises: (i) hybridizing the single-strand DNA flap to the endogenous DNA strand adjacent the cut site to create a sequence mismatch; (ii) excising the endogenous DNA strand; and (iii) repairing the mismatch to form the desired product comprising the desired nucleotide change in both strands of DNA.
   77. The method of embodiment 76, wherein the desired nucleotide change is a single nucleotide substitution, a deletion, or an insertion.
   78. The method of embodiment 77, wherein the single nucleotide substitution is a transition or a transversion.
   79. The method of embodiment 76, wherein the desired nucleotide change is (1) a G to T substitution, (2) a G to A substitution, (3) a G to C substitution, (4) a T to G substitution, (5) a T to A substitution, (6) a T to C substitution, (7) a C to G substitution, (8) a C to T substitution, (9) a C to A substitution, (10) an A to T substitution, (11) an A to G substitution, or (12) an A to C substitution.
   80. The method of embodiment 76, wherein the desired nucleoid change converts (1) a G:C basepair to a T:A basepair, (2) a G:C basepair to an A:T basepair, (3) a G:C basepair to C:G basepair, (4) a T:A basepair to a G:C basepair, (5) a T:A basepair to an A:T basepair, (6) a T:A basepair to a C:G basepair, (7) a C:G basepair to a G:C basepair, (8) a C:G basepair to a T:A basepair, (9) a C:G basepair to an A:T basepair, (10) an A:T basepair to a T:A basepair, (11) an A:T basepair to a G:C basepair, or (12) an A:T basepair to a C:G basepair.
   81. The method of embodiment 76, wherein the desired nucleotide change is an insertion or deletion of 1, 2, 3, 4, 5, 6, 7, 8, 9, 10, 11, 12, 13, 14, 15, 16, 17, 18, 19, 20, 21, 22, 23, 24, or 25 nucleotides.
   82. The method of embodiment 76, wherein the desired nucleotide change corrects a disease-associated gene.
   83. The method of embodiment 82, wherein the disease-associated gene is associated with a monogentic disorder selected from the group consisting of: Adenosine Deaminase (ADA) Deficiency; Alpha-1 Antitrypsin Deficiency; Cystic Fibrosis; Duchenne Muscular Dystrophy; Galactosemia; Hemochromatosis; Huntington's Disease; Maple Syrup Urine Disease; Marfan Syndrome; Neurofibromatosis Type 1; Pachyonychia Congenita; Phenylkeotnuria; Severe Combined Immunodeficiency; Sickle Cell Disease; Smith-Lemli-Opitz Syndrome; and Tay-Sachs Disease.
   84. The method of embodiment 82, wherein the disease-associated gene is associated with a polygenic disorder selected from the group consisting of: heart disease; high blood pressure; Alzheimer's disease; arthritis; diabetes; cancer; and obesity.
   85. The method of embodiment 76, wherein the napDNAbp is a nuclease dead Cas9 (dCas9), a Cas9 nickase (nCas9), or a nuclease active Cas9.
   86. The method of embodiment 76, wherein the napDNAbp comprises an amino acid sequence of SEQ ID NO: 18.
   87. The method of embodiment 76, wherein the napDNAbp comprises an amino acid sequence having at least 80%, 85%, 90%, 95%, 98%, or 99% sequence identity with the amino acid sequence of any one of SEQ ID NOs: 18-88, 126, 130, 137, 141, 147, 153, 157, 445, 460, 467, and 482-487.
   88. The method of embodiment 76, wherein the reverse transcriptase comprises any one of the amino acid sequences of SEQ ID NOs: 89-100, 105-122, 128-129, 132, 139, 143, 149, 154, 159, 235, 454, 471, 516, 662, 700, 701-716, 739-741, and 766.
   89. The method of embodiment 76, wherein the reverse transcriptase domain comprises an amino acid sequence having at least 80%, 85%, 90%, 95%, 98%, or 99% sequence identity with the amino acid sequence of any one of SEQ ID NOs: 89-100, 105-122, 128-129, 132, 139, 143, 149, 154, 159, 235, 454, 471, 516, 662, 700, 701-716, 739-741, and 766.
   90. The method of embodiment 76, wherein the extended guide RNA comprises an RNA extension at the 3′ or 5′ ends or at an intramolecular location in the guide RNA, wherein the RNA extension comprises the reverse transcription template sequence.
   91. The method of embodiment 90, wherein the RNA extension is at least 5 nucleotides, at least 6 nucleotides, at least 7 nucleotides, at least 8 nucleotides, at least 9 nucleotides, at least 10 nucleotides, at least 11 nucleotides, at least 12 nucleotides, at least 13 nucleotides, at least 14 nucleotides, at least 15 nucleotides, at least 16 nucleotides, at least 17 nucleotides, at least 18 nucleotides, at least 19 nucleotides, at least 20 nucleotides, at least 21 nucleotides, at least 22 nucleotides, at least 23 nucleotides, at least 24 nucleotides, or at least 25 nucleotides in length.
   92. The method of embodiment 76, wherein the extended guide RNA has a nucleotide sequence selected from the group consisting of SEQ ID NOs: 394, 429-442, 641-649, 678-692, 2997-3103, 3113-3121, 3305-3455, 3479-3493, 3522-3556, 3628-3698, and 3755-3810.
   93. A method for introducing one or more changes in the nucleotide sequence of a DNA molecule at a target locus, comprising:
[2033] (i) contacting the DNA molecule with a nucleic acid programmable DNA binding protein (napDNAbp) and a guide RNA which targets the napDNAbp to the target locus, wherein the guide RNA comprises a reverse transcriptase (RT) template sequence comprising at least one desired nucleotide change;
[2034] (ii) forming an exposed 3′ end in a DNA strand at the target locus;
[2035] (iii) hybridizing the exposed 3′ end to the RT template sequence to prime reverse transcription;
[2036] (iv) synthesizing a single strand DNA flap comprising the at least one desired nucleotide change based on the RT template sequence by reverse transcriptase;
[2037] (v) and incorporating the at least one desired nucleotide change into the corresponding endogenous DNA, thereby introducing one or more changes in the nucleotide sequence of the DNA molecule at the target locus.
   94. The method of embodiment 93, wherein the one or more changes in the nucleotide sequence comprises a transition.
   95. The method of embodiment 94, wherein the transition is selected from the group consisting of: (a) T to C; (b) A to G; (c) C to T; and (d) G to A.
   96. The method of embodiment 93, wherein the one or more changes in the nucleotide sequence comprises a transversion.
   97. The method of embodiment 96, wherein the transversion is selected from the group consisting of: (a) T to A; (b) T to G; (c) C to G; (d) C to A; (e) A to T; (f) A to C; (g) G to C; and (h) G to T.
   98. The method of embodiment 93, wherein the one or more changes in the nucleotide sequence comprises changing (1) a G:C basepair to a T:A basepair, (2) a G:C basepair to an A:T basepair, (3) a G:C basepair to C:G basepair, (4) a T:A basepair to a G:C basepair, (5) a T:A basepair to an A:T basepair, (6) a T:A basepair to a C:G basepair, (7) a C:G basepair to a G:C basepair, (8) a C:G basepair to a T:A basepair, (9) a C:G basepair to an A:T basepair, (10) an A:T basepair to a T:A basepair, (11) an A:T basepair to a G:C basepair, or (12) an A:T basepair to a C:G basepair.
   99. The method of embodiment 93, wherein the one or more changes in the nucleotide sequence comprises an insertion or deletion of 1, 2, 3, 4, 5, 6, 7, 8, 9, 10, 11, 12, 13, 14, 15, 16, 17, 18, 19, 20, 21, 22, 23, 24, or 25 nucleotides.
   100. The method of embodiment 93, wherein the one or more changes in the nucleotide sequence comprises a correction to a disease-associated gene.
   101. The method of embodiment 100, wherein the disease-associated gene is associated with a monogentic disorder selected from the group consisting of: Adenosine Deaminase (ADA) Deficiency; Alpha-1 Antitrypsin Deficiency; Cystic Fibrosis; Duchenne Muscular Dystrophy; Galactosemia; Hemochromatosis; Huntington's Disease; Maple Syrup Urine Disease; Marfan Syndrome; Neurofibromatosis Type 1; Pachyonychia Congenita; Phenylkeotnuria; Severe Combined Immunodeficiency; Sickle Cell Disease; Smith-Lemli-Opitz Syndrome; and Tay-Sachs Disease.
   102. The method of embodiment 100, wherein the disease-associated gene is associated with a polygenic disorder selected from the group consisting of: heart disease; high blood pressure; Alzheimer's disease; arthritis; diabetes; cancer; and obesity.
   103. The method of embodiment 93, wherein the napDNAbp is a nuclease active Cas9 or variant thereof.
   104. The method of embodiment 93, wherein the napDNAbp is a nuclease inactive Cas9 (dCas9) or Cas9 nickase (nCas9), or a variant thereof.
   105. The method of embodiment 93, wherein the napDNAbp comprises an amino acid sequence of SEQ ID NO: 18.
   106. The method of embodiment 93, wherein the napDNAbp comprises an amino acid sequence having at least 80%, 85%, 90%, 95%, 98%, or 99% sequence identity with the amino acid sequence of any one of SEQ ID NOs: 18-88, 126, 130, 137, 141, 147, 153, 157, 445, 460, 467, and 482-487.
   107. The method of embodiment 93, wherein the reverse transcriptase is introduced in trans.
   108. The method of embodiment 93, wherein the napDNAbp comprises a fusion to a reverse transcriptase.
   109. The method of embodiment 93, wherein the reverse transcriptase comprises any one of the amino acid sequences of SEQ ID NOs: 89-100, 105-122, 128-129, 132, 139, 143, 149, 154, 159, 235, 454, 471, 516, 662, 700, 701-716, 739-741, and 766.
   110. The method of embodiment 93, wherein the reverse transcriptase comprises an amino acid sequence having at least 80%, 85%, 90%, 95%, 98%, or 99% sequence identity with the amino acid sequence of any one of SEQ ID NOs: 89-100, 105-122, 128-129, 132, 139, 143, 149, 154, 159, 235, 454, 471, 516, 662, 700, 701-716, 739-741, and 766.
   111. The method of embodiment 93, wherein the step of forming an exposed 3′ end in the DNA strand at the target locus comprises nicking the DNA strand with a nuclease.
   112. The method of embodiment 111, wherein the nuclease is the napDNAbp, is provided as a fusion domain of napDNAbp, or is provided in trans.
   113. The method of embodiment 93, wherein the step of forming an exposed 3′ end in the DNA strand at the target locus comprises contacting the DNA strand with a chemical agent.
   114. The method of embodiment 93, wherein the step of forming an exposed 3′ end in the DNA strand at the target locus comprises introducing a replication error.
   115. The method of embodiment 93, wherein the step of contacting the DNA molecule with the napDNAbp and the guide RNA forms an R-loop.
   116. The method of embodiment 115, wherein the DNA strand in which the exposed 3′ end is formed is in the R-loop.
   117. The method of embodiment 93, wherein guide RNA comprises an extended portion that comprises the reverse transcriptase (RT) template sequence.
   118. The method of embodiment 117, wherein the extended portion is at the 3′ end of the guide RNA, the 5′ end of the guide RNA, or at an intramolecular position in the guide RNA.
   119. The method of embodiment 93, wherein the guide RNA further comprises a primer binding site.
   120. The method of embodiment 93, wherein the guide RNA further comprises a spacer sequence.
   121. The method of embodiment 93, wherein the RT template sequence is homologous to the corresponding endogenous DNA.
   122. A method for introducing one or more changes in the nucleotide sequence of a DNA molecule at a target locus by target-primed reverse transcription, the method comprising: (a) contacting the DNA molecule at the target locus with a (i) fusion protein comprising a nucleic acid programmable DNA binding protein (napDNAbp) and a reverse transcriptase and (ii) a guide RNA comprising an RT template comprising a desired nucleotide change; (b) conducting target-primed reverse transcription of the RT template to generate a single strand DNA comprising the desired nucleotide change; and (c) incorporating the desired nucleotide change into the DNA molecule at the target locus through a DNA repair and/or replication process.
   123. The method of embodiment 122, wherein the RT template is located at the 3′ end of the guide RNA, the 5′ end of the guide RNA, or at an intramolecular location in the guide RNA.
   124. The method of embodiment 122, wherein the desired nucleotide change comprises a transition, a transversion, an insertion, or a deletion, or any combination thereof.
   125. The method of embodiment 122, wherein the desired nucleotide change comprises a transition selected from the group consisting of: (a) T to C; (b) A to G; (c) C to T; and (d) G to A.
   126. The method of embodiment 122, wherein the desired nucleotide change comprises a transversion selected from the group consisting of: (a) T to A; (b) T to G; (c) C to G; (d) C to A; (e) A to T; (f) A to C; (g) G to C; and (h) G to T.
   127. The method of embodiment 122, wherein the desired nucleotide change comprises changing (1) a G:C basepair to a T:A basepair, (2) a G:C basepair to an A:T basepair, (3) a G:C basepair to C:G basepair, (4) a T:A basepair to a G:C basepair, (5) a T:A basepair to an A:T basepair, (6) a T:A basepair to a C:G basepair, (7) a C:G basepair to a G:C basepair, (8) a C:G basepair to a T:A basepair, (9) a C:G basepair to an A:T basepair, (10) an A:T basepair to a T:A basepair, (11) an A:T basepair to a G:C basepair, or (12) an A:T basepair to a C:G basepair.
   128. A polynucleotide encoding the extended guide RNA of any one of embodiments 31-47.
   129. A vector comprising the polynucleotide of embodiment 128.
   130. A cell comprising the vector of embodiment 129.
   131. The fusion protein of any of embodiments 1-30, wherein the reverse transcriptase is an error-prone reverse transcriptase.
   132. A method for mutagenizing a DNA molecule at a target locus by target-primed reverse transcription, the method comprising: (a) contacting the DNA molecule at the target locus with a (i) fusion protein comprising a nucleic acid programmable DNA binding protein (napDNAbp) and an error-prone reverse transcriptase and (ii) a guide RNA comprising an RT template comprising a desired nucleotide change; (b) conducting target-primed reverse transcription of the RT template to generate a mutagenized single strand DNA; and (c) incorporating the mutagenized single strand DNA into the DNA molecule at the target locus through a DNA repair and/or replication process.
   133. The method of embodiment 132, wherein the fusion protein comprises the amino acid sequence of PE1, PE2, or PE3.
   134. The method of embodiment 132, wherein the napDNAbp is a Cas9 nickase (nCas9).
   135. The method of embodiment 132, wherein the napDNAbp comprises the amino acid sequence of SEQ ID NOs: 18-88, 126, 130, 137, 141, 147, 153, 157, 445, 460, 467, and 482-487.
   136. The method of embodiment 132, wherein the guide RNA comprises SEQ ID NO: 222.
   137. The method of embodiment 132, wherein the step of (b) conducting target-primed reverse transcription comprises generating a 3′ end primer binding sequence at the target locus that is capable of priming reverse transcription by annealing to a primer binding site on the guide RNA.
   138. A method for replacing a trinucleotide repeat expansion mutation in a target DNA molecule with a healthy sequence comprising a healthy number of repeat trinucleotides, the method comprising: (a) contacting the DNA molecule at the target locus with a (i) fusion protein comprising a nucleic acid programmable DNA binding protein (napDNAbp) and a reverse transcriptase and (ii) a guide RNA comprising an RT template comprising the replacement sequence, wherein said fusion protein intr; (b) conducting target-primed reverse transcription of the RT template to generate a single strand DNA comprising the replacement sequence; and (c) incorporating the single strand DNA into the DNA molecule at the target locus through a DNA repair and/or replication process.
   139. The method of embodiment 138, wherein the fusion protein comprises the amino acid sequence of PE1, PE2, or PE3.
   140. The method of embodiment 138, wherein the napDNAbp is a Cas9 nickase (nCas9).
   141. The method of embodiment 138, wherein the napDNAbp comprises the amino acid sequence of SEQ ID NOs: 18-88, 126, 130, 137, 141, 147, 153, 157, 445, 460, 467, and 482-487.
   142. The method of embodiment 138, wherein the guide RNA comprises SEQ ID NO: 222.
   143. The method of embodiment 138, wherein the step of (b) conducting target-primed reverse transcription comprises generating a 3′ end primer binding sequence at the target locus that is capable of priming reverse transcription by annealing to a primer binding site on the guide RNA.
   144. The method of embodiment 138, wherein the trinucleotide repeat expansion mutation is associated with Huntington's Disease, Fragile X syndrome, or Friedreich's ataxia.
   145. The method of embodiment 138, wherein the trinucleotide repeat expansion mutation comprises a repeating unit of CAG triplets.
   146. The method of embodiment 138, wherein the trinucleotide repeat expansion mutation comprises a repeating unit of GAA triplets.
   147. A method of installing a functional moiety in a protein of interest encoded by a target nucleotide sequence by prime editing, the method comprising: (a) contacting the target nucleotide sequence with a (i) prime editor comprising a nucleic acid programmable DNA binding protein (napDNAbp) and a reverse transcriptase and (ii) a PEgRNA comprising an edit template encoding the functional moiety; (b) polymerizing a single strand DNA sequence encoding the functional moiety; and (c) incorporating the single strand DNA sequence in place of a corresponding endogenous strand at the target nucleotide sequence through a DNA repair and/or replication process, wherein the method produces a recombinant target nucleotide sequence that encodes a fusion protein comprising the protein of interest and the functional moiety.
   148. The method of embodiment 147, wherein functional moiety is peptide tag.
   149. The method of embodiment 148, wherein the peptide tag is an affinity tag, solubilization tag, chromatography tag, epitope tag, or a fluorescence tag.
   150. The method of embodiment 148, wherein the peptide tag is selected from the group consisting of: AviTag (SEQ ID NO: 245); C-tag (SEQ ID NO: 246); Calmodulin-tag (SEQ ID NO: 247); polyglutamate tag (SEQ ID NO: 248); E-tag (SEQ ID NO: 249); FLAG-tag (SEQ ID NO: 2); HA-tag (SEQ ID NO: 5); His-tag (SEQ ID NOs: 252-262); Myc-tag (SEQ ID NO: 6); NE-tag (SEQ ID NO: 264); Rho1D4-tag (SEQ ID NO: 265); S-tag (SEQ ID NO: 266); SBP-tag (SEQ ID NO: 267); Softag-1 (SEQ ID NO: 268); Softag-2 (SEQ ID NO: 269); Spot-tag (SEQ ID NO: 270); Strep-tag (SEQ ID NO: 271); TC tag (SEQ ID NO: 272); Ty tag (SEQ ID NO: 273); V5 tag (SEQ ID NO: 3); VSV-tag (SEQ ID NO: 275); and Xpress tag (SEQ ID NO: 276).
   151. The method of embodiment 148, wherein the peptide tag is selected from the group consisting of: AU1 epitope (SEQ ID NO: 278); AU5 epitope (SEQ ID NO: 279); Bacteriophage T7 epitope (T7-tag) (SEQ ID NO: 280); Bluetongue virus tag (B-tag) (SEQ ID NO: 281); E2 epitope (SEQ ID NO: 282); Histidine affinity tag (HAT) (SEQ ID NO: 283); HSV epitope (SEQ ID NO: 284); Polyarginine (Arg-tag) (SEQ ID NO: 285); Polyaspartate (Asp-tag) (SEQ ID NO: 286); Polyphenylalanine (Phe-tag) (SEQ ID NO: 287); S1-tag (SEQ ID NO: 288); S-tag (SEQ ID NO: 266); and VSV-G (SEQ ID NO: 275).
   152. The method of embodiment 147, wherein the functional moiety is an immunoepitope.
   153. The method of embodiment 152, wherein the immunoepitope is selected from the group consisting of: tetanus toxoid (SEQ ID NO: 396); diphtheria toxin mutant CRM197 (SEQ ID NO: 398); mumps immunoepitope 1 (SEQ ID NO: 400); mumps immunoepitope 2 (SEQ ID NO: 402); mumps immunoeptitope 3 (SEQ ID NO: 404); rubella virus (SEQ ID NO: 406); hemagglutinin (SEQ ID NO: 408); neuraminidase (SEQ ID NO: 410); TAP1 (SEQ ID NO: 412); TAP2 (SEQ ID NO: 414); hemagglutinin epitopes toward class I HLA (SEQ ID NO: 416); neuraminidase epitopes toward class I HLA (SEQ ID NO: 418); hemagglutinin epitopes toward class II HLA (SEQ ID NO: 420); neuraminidase epitopes toward class II HLA (SEQ ID NO: 422); hemagglutinin epitope H5N1-bound class I and class II HLA (SEQ ID NO: 424); neuraminidase epitope H5N1-bound class I and class II HLA (SEQ ID NO: 426).
   154. The method of embodiment 147, wherein the functional moiety alters the localization of the protein of interest.
   155. The method of embodiment 147, wherein the functional moiety is a degradation tag such that the degradation rate of the protein of interest is altered.
   156. The method of embodiment 155, wherein the degradation tag comprises an amino acid sequence encoding the degradation tags as disclosed herein.
   157. The method of embodiment 147, wherein the functional moiety is a small molecule binding domain.
   158. The method of embodiment 157, wherein the small molecule binding domain is FKBP12 of SEQ ID NO: 488.
   159. The method of embodiment 157, wherein the small molecule binding domain is FKBP12-F36V of SEQ ID NO: 489.
   160. The method of embodiment 157, wherein the small molecule binding domain is cyclophilin of SEQ ID NOs: 490 and 493-494.
   161. The method of embodiment 157, wherein the small molecule binding domain is installed in two or more proteins of interest.
   162. The method of embodiment 161, wherein the two or more proteins of interest may dimerize upon contacting with a small molecule.
   163. The method of embodiment 157, wherein the small molecule is a dimer of a small molecule selected from the group consisting of:

[chemical structure]

[chemical structure]

164. A method of installing an immunoepitope in a protein of interest encoded by a target nucleotide sequence by prime editing, the method comprising: (a) contacting the target nucleotide sequence with a (i) prime editor comprising a nucleic acid programmable DNA binding protein (napDNAbp) and a reverse transcriptase and (ii) a PEgRNA comprising an edit template encoding the functional moiety; (b) polymerizing a single strand DNA sequence encoding the immunoepitope; and (c) incorporating the single strand DNA sequence in place of a corresponding endogenous strand at the target nucleotide sequence through a DNA repair and/or replication process, wherein the method produces a recombinant target nucleotide sequence that encodes a fusion protein comprising the protein of interest and the immunoepitope.
165. The method of embodiment 164, wherein the immunoepitope is selected from the group consisting of: tetanus toxoid (SEQ ID NO: 396); diphtheria toxin mutant CRM197 (SEQ ID NO: 398); mumps immunoepitope 1 (SEQ ID NO: 400); mumps immunoepitope 2 (SEQ ID NO: 402); mumps immunoeptitope 3 (SEQ ID NO: 404); rubella virus (SEQ ID NO: 406); hemagglutinin (SEQ ID NO: 408); neuraminidase (SEQ ID NO: 410); TAP1 (SEQ ID NO: 412); TAP2 (SEQ ID NO: 414); hemagglutinin epitopes toward class I HLA (SEQ ID NO: 416); neuraminidase epitopes toward class I HLA (SEQ ID NO: 418); hemagglutinin epitopes toward class II HLA (SEQ ID NO: 420); neuraminidase epitopes toward class II HLA (SEQ ID NO: 422); hemagglutinin epitope H5N1-bound class I and class II HLA (SEQ ID NO: 424); neuraminidase epitope H5N1-bound class I and class II HLA (SEQ ID NO: 426).
166. The method of embodiment 164, wherein the fusion protein comprises the amino acid sequence of PE1, PE2, or PE3.
167. The method of embodiment 164, wherein the napDNAbp is a Cas9 nickase (nCas9).
168. The method of embodiment 164, wherein the napDNAbp comprises the amino acid sequence of SEQ ID NOs: 18-88, 126, 130, 137, 141, 147, 153, 157, 445, 460, 467, and 482-487.
169. The method of embodiment 164, wherein the guide RNA comprises SEQ ID NO: 222.
170. A method of installing a small molecule dimerization domain in a protein of interest encoded by a target nucleotide sequence by prime editing, the method comprising: (a) contacting the target nucleotide sequence with a (i) prime editor comprising a nucleic acid programmable DNA binding protein (napDNAbp) and a reverse transcriptase and (ii) a PEgRNA comprising an edit template encoding the small molecule dimerization domain; (b) polymerizing a single strand DNA sequence encoding the immunoepitope; and (c) incorporating the single strand DNA sequence in place of a corresponding endogenous strand at the target nucleotide sequence through a DNA repair and/or replication process, wherein the method produces a recombinant target nucleotide sequence that encodes a fusion protein comprising the protein of interest and the small molecule dimerization domain.
171. The method of embodiment 170, further comprising conducting the method on a second protein of interest.
172. The method of embodiment 171, wherein the first protein of interest and the second protein of interest dimerize in the presence of a small molecule that binds to the dimerization domain on each of said proteins.
173. The method of embodiment 170, wherein the small molecule binding domain is FKBP12 of SEQ ID NO: 488.
174. The method of embodiment 170, wherein the small molecule binding domain is FKBP12-F36V of SEQ ID NO: 489.
175. The method of embodiment 170, wherein the small molecule binding domain is cyclophilin of SEQ ID NOs: 490 and 493-494.
176. The method of embodiment 170, wherein the small molecule is a dimer of a small molecule selected from the group consisting of:

[chemical structure]

[chemical structure]

177. The method of embodiment 170, wherein the fusion protein comprises the amino acid sequence of PE1, PE2, or PE3.
178. The method of embodiment 170, wherein the napDNAbp is a Cas9 nickase (nCas9).
179. The method of embodiment 170, wherein the napDNAbp comprises the amino acid sequence of SEQ ID NOs: 18-88, 126, 130, 137, 141, 147, 153, 157, 445, 460, 467, and 482-487.
180. The method of embodiment 170, wherein the guide RNA comprises SEQ ID NO: 222.
181. A method of installing a peptide tag or epitope onto a protein using prime editing, comprising: contacting a target nucleotide sequence encoding the protein with a prime editor construct configured to insert therein a second nucleotide sequence encoding the peptide tag to result in a recombinant nucleotide sequence, such that the peptide tag and the protein are expressed from the recombinant nucleotide sequence as a fusion protein.
182. The method of embodiment 181, wherein the peptide tag is used for purification and/or detection of the protein.
183. The method of embodiment 181, wherein the peptide tag is a poly-histidine (e.g., HHHHHH (SEQ ID NOs: 252-262), FLAG (e.g., DYKDDDDK (SEQ ID NO: 2)), V5 (e.g., GKPIPNPLLGLDST (SEQ ID NO: 3)), GCN4, HA (e.g., YPYDVPDYA (SEQ ID NO: 5)), Myc (e.g. EQKLISEED(SEQ ID NO: 6)), GST . . . etc.
184. The method of embodiment 181, wherein the peptide tag has an amino acid sequence selected from the group consisting of SEQ ID NO: 245-290.
185. The method of embodiment 181, wherein the peptide tag is fused to the protein by a linker.
186. The method of embodiment 181, wherein the fusion protein has the following structure: [protein]-[peptide tag] or [peptide tag]-[protein], wherein “]-[” represents an optional linker.
187. The method of embodiment 181, wherein the linker has an amino acid sequence of SEQ ID NO: 127, 165-176, 446, 453, and 767-769.
188. The method of embodiment 181, wherein the prime editor construct comprises a PEgRNA comprising the nucleotide sequence of SEQ ID NOs: 18-101-104, 181-183, 223-234, 237-244, 277, 324-330, 332, 334, 336, 338, 340, 342, 344, 346, 348, 350, 352, 354, 356, 358, 360, 362, 364, 366, 368, 394, 429-442, 499-505, 641-649, 678-692, 735-736, 757-761, 776-777, 2997-3103, 3113-3121, 3305-3455, 3479-3493, 3522-3540, 3549-3556, 3628-3698, 3755-3810, 3874, 3890-3901, 3905-3911, 3913-3929, 3972-3989.
189. The method of embodiment 181, wherein the PEgRNA comprises a spacer, a gRNA core, and an extension arm, wherein the spacer is complementary to the target nucleotide sequence and the extension arm comprises a reverse transcriptase template that encodes the peptide tag.
190. The method of embodiment 181, wherein the PEgRNA comprises a spacer, a gRNA core, and an extension arm, wherein the spacer is complementary to the target nucleotide sequence and the extension arm comprises a reverse transcriptase template that encodes the peptide tag.
191. A method of preventing or halting the progression of a prion disease by installing on or more protective mutations into PRNP encoded by a target nucleotide sequence by prime editing, the method comprising: (a) contacting the target nucleotide sequence with a (i) prime editor comprising a nucleic acid programmable DNA binding protein (napDNAbp) and a reverse transcriptase and (ii) a PEgRNA comprising an edit template encoding the functional moiety; (b) polymerizing a single strand DNA sequence encoding the protective mutation; and (c) incorporating the single strand DNA sequence in place of a corresponding endogenous strand at the target nucleotide sequence through a DNA repair and/or replication process, wherein the method produces a recombinant target nucleotide sequence that encodes a PRNP comprising a protective mutation and which is resistant to misfolding.
192. The method of embodiment 191, wherein the prion disease is a human prion disease.
193. The method of embodiment 191, wherein the prion disease is an animal prion disease.
194. The method of embodiment 192, wherein the prion disease is Creutzfeldt-Jakob Disease (CJD), Variant Creutzfeldt-Jakob Disease (νCJD), Gerstmann-Straussler-Scheinker Syndrome, Fatal Familial Insomnia, or Kuru.
195. The method of embodiment 193, wherein the prion disease is Bovine Spongiform Encephalopathy (BSE or “mad cow disease”), Chronic Wasting Disease (CWD), Scrapie, Transmissible Mink Encephalopathy, Feline Spongiform Encephalopathy, and Ungulate Spongiform Encephalopathy.
196. The method of embodiment 191, wherein the wildtype PRNP amino acid sequence is SEQ ID NOs: 291-292.
197. The method of embodiment 191, wherein the method results in a modified PRNP amino acid sequence selected from the group consisting of SEQ ID NOs: 293-323, wherein said modified PRNP protein is resistant to misfolding.
198. The method of embodiment 191, wherein the fusion protein comprises the amino acid sequence of PE1, PE2, or PE3.
199. The method of embodiment 191, wherein the napDNAbp is a Cas9 nickase (nCas9).
200. The method of embodiment 191, wherein the napDNAbp comprises the amino acid sequence of SEQ ID NOs: 18-88, 126, 130, 137, 141, 147, 153, 157, 445, 460, 467, and 482-487.
201. The method of embodiment 191, wherein the guide RNA comprises SEQ ID NO: 222.
202. A method of installing a ribonucleotide motif or tag in an RNA of interest encoded by a target nucleotide sequence by prime editing, the method comprising: (a) contacting the target nucleotide sequence with a (i) prime editor comprising a nucleic acid programmable DNA binding protein (napDNAbp) and a reverse transcriptase and (ii) a PEgRNA comprising an edit template encoding the ribonucleotide motif or tag; (b) polymerizing a single strand DNA sequence encoding the ribonucleotide motif or tag; and (c) incorporating the single strand DNA sequence in place of a corresponding endogenous strand at the target nucleotide sequence through a DNA repair and/or replication process, wherein the method produces a recombinant target nucleotide sequence that encodes a modified RNA of interest comprising the ribonucleotide motif or tag.
203. The method of embodiment 202, wherein ribonucleotide motif or tag is a detection moiety.
204. The method of embodiment 202, wherein the ribonucleotide motif or tag affects the expression level of the RNA of interest.
205. The method of embodiment 202, wherein the ribonucleotide motif or tag affects the transport or subcellular location of the RNA of interest.
206. The method of embodiment 202, wherein the ribonucleotide motif or tag is selected from the group consisting of SV40 type 1, SV40 type 2, SV40 type 3, hGH, BGH, rbGlob, TK, MALAT1 ENE-mascRNA, KSHV PAN ENE, Smbox/U1 snRNA box, U1 snRNA 3′ box, tRNA-lysine, broccoli aptamer, spinach aptamer, mango aptamer, HDV ribozyme, and m6A.
207. The method of embodiment 202, wherein the PEgRNA comprises SEQ ID NOs: 101-104, 181-183, 223-234, 237-244, 277, 324-330, 332, 334, 336, 338, 340, 342, 344, 346, 348, 350, 352, 354, 356, 358, 360, 362, 364, 366, 368, 394, 429-442, 499-505, 641-649, 678-692, 735-736, 757-761, 776-777, 2997-3103, 3113-3121, 3305-3455, 3479-3493, 3522-3540, 3549-3556, 3628-3698, 3755-3810, 3874, 3890-3901, 3905-3911, 3913-3929, 3972-3989.
208. The method of embodiment 202, wherein the fusion protein comprises the amino acid sequence of PE1, PE2, or PE3.
209. The method of embodiment 202, wherein the napDNAbp is a Cas9 nickase (nCas9).
210. The method of embodiment 202, wherein the napDNAbp comprises the amino acid sequence of SEQ ID NOs: 18-88, 126, 130, 137, 141, 147, 153, 157, 445, 460, 467, and 482-487.
211. A method of installing or deleting a functional moiety in a protein of interest encoded by a target nucleotide sequence by prime editing, the method comprising: (a) contacting the target nucleotide sequence with a (i) prime editor comprising a nucleic acid programmable DNA binding protein (napDNAbp) and a reverse transcriptase and (ii) a PEgRNA comprising an edit template encoding the functional moiety or deletion of same; (b) polymerizing a single strand DNA sequence encoding the functional moiety or deletion of same; and (c) incorporating the single strand DNA sequence in place of a corresponding endogenous strand at the target nucleotide sequence through a DNA repair and/or replication process, wherein the method produces a recombinant target nucleotide sequence that encodes a modified protein comprising the protein of interest and the functional moiety or the removal of same, wherein the functional moiety alters a modification state or localization state of the protein.
212. The method of embodiment 211, wherein functional moiety alters the phosphorylation, ubiquitylation, glycosylation, lipidation, hydroxylation, methylation, acetylation, crotonylation, SUMOylation state of the protein of interest.

### Group 2. Embodiments 213-424

[2038] 213. A fusion protein comprising a nucleic acid programmable DNA binding protein (napDNAbp) and a polymerase.
214. The fusion protein of embodiment 213, wherein the fusion protein is capable of carrying out prime editing in the presence of an prime editing guide RNA (PEgRNA).
215. The fusion protein of embodiment 213, wherein the napDNAbp has a nickase activity.
216. The fusion protein of embodiment 213, wherein the napDNAbp is a Cas9 protein or variant thereof.
217. The fusion protein of embodiment 213, wherein the napDNAbp is a nuclease active Cas9, a nuclease inactive Cas9 (dCas9), or a Cas9 nickase (nCas9).
218. The fusion protein of embodiment 213, wherein the napDNAbp is Cas9 nickase (nCas9).
219. The fusion protein of embodiment 213, wherein the napDNAbp is selected from the group consisting of: Cas9, Cas12e, Cas12d, Cas12a, Cas12b1, Cas13a, Cas12c, and Argonaute and optionally has a nickase activity.
220. The fusion protein of embodiment 213, wherein the fusion protein when complexed with a PEgRNA is capable of binding to a target DNA sequence.
221. The fusion protein of embodiment 220, wherein the target DNA sequence comprises a target strand and a complementary non-target strand.
222. The fusion protein of embodiment 220, wherein the binding of the fusion protein complexed to the PEgRNA forms an R-loop.
223. The fusion protein of embodiment 222, wherein the R-loop comprises (i) an RNA-DNA hybrid comprising the PEgRNA and the target strand, and (ii) the complementary non-target strand.
224. The fusion protein of embodiment 223, wherein the complementary non-target strand is nicked to form a priming sequence having a free 3′ end.
225. The fusion protein of embodiment 214, wherein the PEgRNA comprises (a) a guide RNA and (b) an extension arm at the 5′ or the 3′ end of the guide RNA, or at an intramolecular location in the guide RNA.
226. The fusion protein of embodiment 225, wherein the extension arm comprises (i) a DNA synthesis template sequence comprising a desired nucleotide change, and (ii) a primer binding site.
227. The fusion protein of embodiment 226, wherein the DNA synthesis template sequence encodes a single-strand DNA flap that is complementary to an endogenous DNA sequence adjacent to the nick site, wherein the single-strand DNA flap comprises the desired nucleotide change.
228. The fusion protein of embodiment 225, wherein the extension arm is at least 5 nucleotides, at least 6 nucleotides, at least 7 nucleotides, at least 8 nucleotides, at least 9 nucleotides, at least 10 nucleotides, at least 11 nucleotides, at least 12 nucleotides, at least 13 nucleotides, at least 14 nucleotides, at least 15 nucleotides, at least 16 nucleotides, at least 17 nucleotides, at least 18 nucleotides, at least 19 nucleotides, at least 20 nucleotides, at least 21 nucleotides, at least 22 nucleotides, at least 23 nucleotides, at least 24 nucleotides, or at least 25 nucleotides in length.
229. The fusion protein of embodiment 227, wherein the single-strand DNA flap hybridizes to the endogenous DNA sequence adjacent to the nick site, thereby installing the desired nucleotide change.
230. The fusion protein of embodiment 227, wherein the single-stranded DNA flap displaces the endogenous DNA sequence adjacent to the nick site and which has a free 5′ end.
231. The fusion protein of embodiment 230, wherein the endogenous DNA sequence having the 5′ end is excised by the cell.
232. The fusion protein of embodiment 230, wherein cellular repair of the single-strand DNA flap results in installation of the desired nucleotide change, thereby forming a desired product.
233. The fusion protein of embodiment 226, wherein the desired nucleotide change is installed in an editing window that is between about −4 to +10 of the PAM sequence, or between about −10 to +20 of the PAM sequence, or between about −20 to +40 of the PAM sequence, or between about −30 to +100 of the PAM sequence, or wherein the desired nucleotide change is installed at least 1, 2, 3, 4, 5, 6, 7, 8, 9, 10, 11, 12, 13, 14, 15, 16, 17, 18, 19, 20, 21, 22, 23, 24, 25, 26, 27, 28, 29, 30, 31, 32, 33, 34, 35, 36, 37, 38, 39, 40, 41, 42, 43, 44, 45, 46, 47, 48, 49, 50, 51, 52, 53, 54, 55, 56, 57, 58, 59, 60, 61, 62, 63, 64, 65, 66, 67, 68, 69, 70, 71, 72, 73, 74, 75, 76, 77, 78, 79, 80, 81, 82, 83, 84, 85, 86, 87, 88, 89, 90, 91, 92, 93, 94, 95, 96, 97, 98, 99, or 100 nucleotides downstream of the nick site.
234. The fusion protein of embodiment 213, wherein the napDNAbp comprises an amino acid sequence of SEQ ID NO: 18, or an amino acid sequence having at least 80%, 85%, 90%, 95%, 98%, or 99% sequence identity with the amino acid sequence to SEQ ID NO: 18.
235. The fusion protein of embodiment 213, wherein the napDNAbp comprises an amino acid sequence having at least 80%, 85%, 90%, 95%, 98%, or 99% sequence identity with the amino acid sequence of any one of SEQ ID NOs: 18-88, 126, 130, 137, 141, 147, 153, 157, 445, 460, 467, and 482-487.
236. The fusion protein of embodiment 213, wherein the polymerase is a reverse transcriptase comprising any one of the amino acid sequences of SEQ ID NOs: 89-100, 105-122, 128-129, 132, 139, 143, 149, 154, 159, 235, 454, 471, 516, 662, 700, 701-716, 739-741, and 766.
237. The fusion protein of embodiment 213, wherein the polymerase is a reverse transcriptase comprising an amino acid sequence having at least 80%, 85%, 90%, 95%, 98%, or 99% sequence identity with the amino acid sequence of any one of SEQ ID NOs: 89-100, 105-122, 128-129, 132, 139, 143, 149, 154, 159, 235, 454, 471, 516, 662, 700, 701-716, 739-741, and 766.
238. The fusion protein of embodiment 213, wherein the polymerase is a naturally-occurring reverse transcriptase from a retrovirus or a retrotransposon.
239. The fusion protein of any one of the previous embodiments, wherein the fusion protein comprises the structure NH₂-[napDNAbp]-[polymerase]-COOH; or NH₂-[polymerase]-[napDNAbp]-COOH, wherein each instance of “14” indicates the presence of an optional linker sequence.
240. The fusion protein of embodiment 239, wherein the linker sequence comprises an amino acid sequence of SEQ ID NOs: 127, 165-176, 446, 453, and 767-769.
241. The fusion protein of embodiment 226, wherein the desired nucleotide change is a single nucleotide change, an insertion of one or more nucleotides, or a deletion of one or more nucleotides.
242. The fusion protein of embodiment 241, wherein the insert or deletion is at least 1, at least 2, at least 3, at least 4, at least 5, at least 6, at least 7, at least 8, at least 9, at least 10, at least 11, at least 12, at least 13, at least 14, at least 15, at least 16, at least 17, at least 18, at least 19, at least 20, at least 21, at least 22, at least 23, at least 24, at least 25, at least 26, at least 27, at least 28, at least 29, at least 30, at least 31, at least 32, at least 33, at least 34, at least 35, at least 36, at least 37, at least 38, at least 39, at least 40, at least 41, at least 42, at least 43, at least 44, at least 45, at least 46, at least 47, at least 48, at least 49, or at least 50.
243. A PEgRNA comprising a guide RNA and at least one nucleic acid extension arm comprising a DNA synthesis template.
244. The PEgRNA of embodiment 241, wherein the nucleic acid extension arm is position at the 3′ or 5′ end of the guide RNA, or at an intramolecular position in the guide RNA, and wherein the nucleic acid extension arm is DNA or RNA.
245. The PEgRNA of embodiment 242, wherein the PEgRNA is capable of binding to a napDNAbp and directing the napDNAbp to a target DNA sequence.
246. The PEgRNA of embodiment 245, wherein the target DNA sequence comprises a target strand and a complementary non-target strand, wherein the guide RNA hybridizes to the target strand to form an RNA-DNA hybrid and an R-loop.
247. The PEgRNA of embodiment 243, wherein the at least one nucleic acid extension arm comprises (i) a DNA synthesis template, and (ii) a primer binding site.
248. The PEgRNA of embodiment 247, wherein the nucleic acid extension arm is at least 5 nucleotides, at least 6 nucleotides, at least 7 nucleotides, at least 8 nucleotides, at least 9 nucleotides, at least 10 nucleotides, at least 11 nucleotides, at least 12 nucleotides, at least 13 nucleotides, at least 14 nucleotides, at least 15 nucleotides, at least 16 nucleotides, at least 17 nucleotides, at least 18 nucleotides, at least 19 nucleotides, at least 20 nucleotides, at least 21 nucleotides, at least 22 nucleotides, at least 23 nucleotides, at least 24 nucleotides, or at least 25 nucleotides in length.
249. The PEgRNA of embodiment 247, wherein the DNA synthesis template is at least 3 nucleotides, at least 4 nucleotides, at least 5 nucleotides, at least 6 nucleotides, at least 7 nucleotides, at least 8 nucleotides, at least 9 nucleotides, at least 10 nucleotides, at least 11 nucleotides, at least 12 nucleotides, at least 13 nucleotides, at least 14 nucleotides, or at least 15 nucleotides in length.
250. The PEgRNA of embodiment 247, wherein the primer binding site is at least 3 nucleotides, at least 4 nucleotides, at least 5 nucleotides, at least 6 nucleotides, at least 7 nucleotides, at least 8 nucleotides, at least 9 nucleotides, at least 10 nucleotides, at least 11 nucleotides, at least 12 nucleotides, at least 13 nucleotides, at least 14 nucleotides, or at least 15 nucleotides in length.
251. The PEgRNA of embodiment 243, further comprising at least one additional structure selected from the group consisting of a linker, a stem loop, a hairpin, a toeloop, an aptamer, or an RNA-protein recruitment domain.
252. The PEgRNA of embodiment 247, wherein the DNA synthesis template encodes a single-strand DNA flap that is complementary to an endogenous DNA sequence adjacent to a nick site, wherein the single-strand DNA flap comprises a desired nucleotide change.
253. The PEgRNA of embodiment 252, wherein the single-stranded DNA flap displaces an endogenous single-strand DNA having a 5′ end in the target DNA sequence that has been nicked, and wherein the endogenous single-strand DNA is immediately adjacent downstream of the nick site.
254. The PEgRNA of embodiment 253, wherein the endogenous single-stranded DNA having the free 5′ end is excised by the cell.
255. The PEgRNA of embodiment 253, wherein cellular repair of the single-strand DNA flap results in installation of the desired nucleotide change, thereby forming a desired product.
256. The PEgRNA of embodiment 243, comprising the nucleotide sequence of SEQ ID NOs: 101-104, 181-183, 223-234, 237-244, 277, 324-330, 332, 334, 336, 338, 340, 342, 344, 346, 348, 350, 352, 354, 356, 358, 360, 362, 364, 366, 368, 394, 429-442, 499-505, 641-649, 678-692, 735-736, 757-761, 776-777, or a nucleotide sequence having at least 85%, or at least 90%, or at least 95%, or at least 98%, or at least 99% sequence identity with any one of SEQ ID NOs: 101-104, 181-183, 223-234, 237-244, 277, 324-330, 332, 334, 336, 338, 340, 342, 344, 346, 348, 350, 352, 354, 356, 358, 360, 362, 364, 366, 368, 394, 429-442, 499-505, 641-649, 678-692, 735-736, 757-761, 776-777, 2997-3103, 3113-3121, 3305-3455, 3479-3493, 3522-3540, 3549-3556, 3628-3698, 3755-3810, 3874, 3890-3901, 3905-3911, 3913-3929, 3972-3989.
257. The PEgRNA of embodiment 247, wherein the DNA synthesis template comprises a nucleotide sequence that is at least 80%, or 85%, or 90%, or 95%, or 99% identical to the endogenous DNA target.
258. The PEgRNA of embodiment 247, wherein the primer binding site hybridizes with a free 3′ end of the cut DNA.
259. The PEgRNA of embodiment 251, wherein the at least one additional structure is located at the 3′ or 5′ end of the PEgRNA.
260. A complex comprising comprising a fusion protein of any one of embodiments 213-242 and an PEgRNA.
261. The complex of embodiment 260, wherein the PEgRNA comprises a guide RNA and an nucleic acid extension arm at the 3′ or 5′ end of the guide RNA or at an intramolecular position in the guide RNA.
262. The complex of embodiment 260, wherein the PEgRNA is capable of binding to a napDNAbp and directing the napDNAbp to a target DNA sequence.
263. The complex of embodiment 262, wherein the target DNA sequence comprises a target strand and a complementary non-target strand, wherein the guide RNA hybridizes to the target strand to form an RNA-DNA hybrid and an R-loop.
264. The complex of embodiment 261, wherein the at least one nucleic acid extension arm comprises (i) a DNA synthesis template, and (ii) a primer binding site.
265. The complex of embodiment 260, wherein the PEgRNA comprises the nucleotide sequence of SEQ ID NOs: 101-104, 181-183, 223-234, 237-244, 277, 324-330, 332, 334, 336, 338, 340, 342, 344, 346, 348, 350, 352, 354, 356, 358, 360, 362, 364, 366, 368, 394, 429-442, 499-505, 641-649, 678-692, 735-736, 757-761, 776-777, 2997-3103, 3113-3121, 3305-3455, 3479-3493, 3522-3540, 3549-3556, 3628-3698, 3755-3810, 3874, 3890-3901, 3905-3911, 3913-3929, 3972-3989, or a nucleotide sequence having at least 85%, or at least 90%, or at least 95%, or at least 98%, or at least 99% sequence identity with any one of SEQ ID NOs: 101-104, 181-183, 223-234, 237-244, 277, 324-330, 332, 334, 336, 338, 340, 342, 344, 346, 348, 350, 352, 354, 356, 358, 360, 362, 364, 366, 368, 394, 429-442, 499-505, 641-649, 678-692, 735-736, 757-761, 776-777, 2997-3103, 3113-3121, 3305-3455, 3479-3493, 3522-3540, 3549-3556, 3628-3698, 3755-3810, 3874, 3890-3901, 3905-3911, 3913-3929, 3972-3989.
266. The complex of embodiment 264, wherein the DNA synthesis template comprises a nucleotide sequence that is at least 80%, or 85%, or 90%, or 95%, or 99% identical to the endogenous DNA target.
267. The complex of embodiment 264, wherein the primer binding site hybridizes with a free 3′ end of the cut DNA.
268. A complex comprising comprising a napDNAbp and an PEgRNA. 269. The complex of embodiment 268, wherein the napDNAbp is a Cas9 nickase. 270. The complex of embodiment 268, wherein the napDNAbp comprises an amino acid sequence of SEQ ID NO: 18.
271. The complex of embodiment 268, wherein the napDNAbp comprises an amino acid sequence having at least 80%, 85%, 90%, 95%, 98%, or 99% sequence identity with the amino acid sequence of any one of SEQ ID NOs: 18-88, 126, 130, 137, 141, 147, 153, 157, 445, 460, 467, and 482-487.
272. The complex of embodiment 268, wherein the PEgRNA comprises a guide RNA and a nucleic acid extension arm at the 3′ or 5′ end of the guide RNA, or at an intramolecular position in the guide RNA.
273. The complex of embodiment 268, wherein the PEgRNA is capable of directing the napDNAbp to a target DNA sequence.
274. The complex of embodiment 272, wherein the target DNA sequence comprises a target strand and a complementary non-target strand, wherein the spacer sequence of the PEgRNA hybridizes to the target strand to form an RNA-DNA hybrid and an R-loop.
275. The complex of embodiment 273, wherein the nucleic acid extension arm comprises (i) a DNA synthesis template, and (ii) a primer binding site.
276. The complex of embodiment 269, wherein the PEgRNA comprises the nucleotide sequence of SEQ ID NOs: 101-104, 181-183, 223-234, 237-244, 277, 324-330, 332, 334, 336, 338, 340, 342, 344, 346, 348, 350, 352, 354, 356, 358, 360, 362, 364, 366, 368, 394, 429-442, 499-505, 641-649, 678-692, 735-736, 757-761, 776-777, 2997-3103, 3113-3121, 3305-3455, 3479-3493, 3522-3540, 3549-3556, 3628-3698, 3755-3810, 3874, 3890-3901, 3905-3911, 3913-3929, 3972-3989, or a nucleotide sequence having at least 85%, or at least 90%, or at least 95%, or at least 98%, or at least 99% sequence identity with any one of SEQ ID NOs: 101-104, 181-183, 223-234, 237-244, 277, 324-330, 332, 334, 336, 338, 340, 342, 344, 346, 348, 350, 352, 354, 356, 358, 360, 362, 364, 366, 368, 394, 429-442, 499-505, 641-649, 678-692, 735-736, 757-761, 776-777, 2997-3103, 3113-3121, 3305-3455, 3479-3493, 3522-3540, 3549-3556, 3628-3698, 3755-3810, 3874, 3890-3901, 3905-3911, 3913-3929, 3972-3989.
277. The complex of embodiment 276, wherein the DNA synthesis template comprises a nucleotide sequence that is at least 80%, or 85%, or 90%, or 95%, or 99% identical to the endogenous DNA target.
278. The complex of embodiment 276, wherein the primer binding site hybridizes with a free 3′ end of the cut DNA.
279. The complex of embodiment 276, wherein the PEgRNA further comprises at least one additional structure selected from the group consisting of a linker, a stem loop, a hairpin, a toeloop, an aptamer, or an RNA-protein recruitment domain.
280. A polynucleotide encoding the fusion protein of any of embodiments 213-242.
281. A vector comprising the polynucleotide of embodiment 280.
282. A cell comprising the fusion protein of any of embodiments 213-242 and an PEgRNA bound to the napDNAbp of the fusion protein.
283. A cell comprising a complex of any one of embodiments 260-279.
284. A pharmaceutical composition comprising: (i) a fusion protein of any of embodiments 213-242, the complex of embodiments 260-279, the polynucleotide of embodiment 68, or the vector of embodiment 69; and (ii) a pharmaceutically acceptable excipient.
285. A pharmaceutical composition comprising: (i) the complex of embodiments 260-279 (ii) a polymerase provided in trans; and (iii) a pharmaceutically acceptable excipient.
286. A kit comprising a nucleic acid construct, comprising: (i) a nuleic acid sequencing encoding the fusion protein of any one of embodiments 213-242; and (ii) a promoter that drives expression of the sequence of (i).
287. A method for installing a desired nucleotide change in a double-stranded DNA sequence, the method comprising:
[2039] (i) contacting the double-stranded DNA sequence with a complex comprising a fusion protein and a PEgRNA, wherein the fusion protein comprises a napDNAbp and a polymerase and wherein the PEgRNA comprises a DNA synthesis template comprising the desired nucleotide change and a primer binding site;
[2040] (ii) nicking the double-stranded DNA sequence, thereby generating a free single-strand DNA having a 3′ end;
[2041] (iii) hybridizing the 3′ end of the free single-strand DNA to the primer binding site, thereby priming the polymerase;
[2042] (iv) polymerizing a strand of DNA from the 3′ end hybridized to the primer binding site, thereby generating a single-strand DNA flap comprising the desired nucleotide change and which is complementary to the DNA synthesis template;
[2043] (v) replacing an endogenous DNA strand adjacent the cut site with the single-strand DNA flap, thereby installing the desired nucleotide change in the double-stranded DNA sequence.
   288. The method of embodiment 287, wherein the step of (v) replacing comprises: (i) hybridizing the single-strand DNA flap to the endogenous DNA strand adjacent the cut site to create a sequence mismatch; (ii) excising the endogenous DNA strand; and (iii) repairing the mismatch to form the desired product comprising the desired nucleotide change in both strands of DNA.
   289. The method of embodiment 288, wherein the desired nucleotide change is a single nucleotide substitution, a deletion, or an insertion.
   290. The method of embodiment 289, wherein the single nucleotide substitution is a transition or a transversion.
   291. The method of embodiment 288, wherein the desired nucleotide change is (1) a G to T substitution, (2) a G to A substitution, (3) a G to C substitution, (4) a T to G substitution, (5) a T to A substitution, (6) a T to C substitution, (7) a C to G substitution, (8) a C to T substitution, (9) a C to A substitution, (10) an A to T substitution, (11) an A to G substitution, or (12) an A to C substitution.
   292. The method of embodiment 288, wherein the desired nucleoid change converts (1) a G:C basepair to a T:A basepair, (2) a G:C basepair to an A:T basepair, (3) a G:C basepair to C:G basepair, (4) a T:A basepair to a G:C basepair, (5) a T:A basepair to an A:T basepair, (6) a T:A basepair to a C:G basepair, (7) a C:G basepair to a G:C basepair, (8) a C:G basepair to a T:A basepair, a C:G basepair to an A:T basepair, (10) an A:T basepair to a T:A basepair, (11) an A:T basepair to a G:C basepair, or (12) an A:T basepair to a C:G basepair.
   293. The method of embodiment 288, wherein the desired nucleotide change is an insertion or deletion of 1, 2, 3, 4, 5, 6, 7, 8, 9, 10, 11, 12, 13, 14, 15, 16, 17, 18, 19, 20, 21, 22, 23, 24, or 25 nucleotides.
   294. The method of embodiment 288, wherein the desired nucleotide change corrects a disease-associated gene.
   295. The method of embodiment 294, wherein the disease-associated gene is associated with a monogentic disorder selected from the group consisting of: Adenosine Deaminase (ADA) Deficiency; Alpha-1 Antitrypsin Deficiency; Cystic Fibrosis; Duchenne Muscular Dystrophy; Galactosemia; Hemochromatosis; Huntington's Disease; Maple Syrup Urine Disease; Marfan Syndrome; Neurofibromatosis Type 1; Pachyonychia Congenita; Phenylkeotnuria; Severe Combined Immunodeficiency; Sickle Cell Disease; Smith-Lemli-Opitz Syndrome; a trinucleotide repeat disorder; a prion disease; and Tay-Sachs Disease.
   296. The method of embodiment 294, wherein the disease-associated gene is associated with a polygenic disorder selected from the group consisting of: heart disease; high blood pressure; Alzheimer's disease; arthritis; diabetes; cancer; and obesity.
   297. The method of embodiment 287, wherein the napDNAbp is a nuclease dead Cas9 (dCas9), a Cas9 nickase (nCas9), or a nuclease active Cas9.
   298. The method of embodiment 287, wherein the napDNAbp comprises an amino acid sequence of SEQ ID NO: 18, or an amino acid sequence having at least 80%, 85%, 90%, 95%, 98%, or 99% sequence identity with the amino acid sequence of SEQ ID NO: 18.
   299. The method of embodiment 287, wherein the napDNAbp comprises an amino acid sequence having at least 80%, 85%, 90%, 95%, 98%, or 99% sequence identity with the amino acid sequence of any one of SEQ ID NOs: 18-88, 126, 130, 137, 141, 147, 153, 157, 445, 460, 467, and 482-487.
   300. The method of embodiment 287, wherein the polymerase is a reverse transcriptase comprising any one of the amino acid sequences of SEQ ID NOs: 89-100, 105-122, 128-129, 132, 139, 143, 149, 154, 159, 235, 454, 471, 516, 662, 700, 701-716, 739-741, and 766.
   301. The method of embodiment 287, wherein the polymerase is a reverse transcriptase comprising an amino acid sequence having at least 80%, 85%, 90%, 95%, 98%, or 99% sequence identity with the amino acid sequence of any one of SEQ ID NOs: 89-100, 105-122, 128-129, 132, 139, 143, 149, 154, 159, 235, 454, 471, 516, 662, 700, 701-716, 739-741, and 766.
   302. The method of embodiment 287, wherein the PEgRNA comprises a nucleic acid extension arm at the 3′ or 5′ ends or at an intramolecular location in the guide RNA, wherein the extension arm comprises the DNA synthesis template sequence and the primer binding site.
   303. The method of embodiment 302, wherein the extension arm is at least 5 nucleotides, at least 6 nucleotides, at least 7 nucleotides, at least 8 nucleotides, at least 9 nucleotides, at least 10 nucleotides, at least 11 nucleotides, at least 12 nucleotides, at least 13 nucleotides, at least 14 nucleotides, at least 15 nucleotides, at least 16 nucleotides, at least 17 nucleotides, at least 18 nucleotides, at least 19 nucleotides, at least 20 nucleotides, at least 21 nucleotides, at least 22 nucleotides, at least 23 nucleotides, at least 24 nucleotides, or at least 25 nucleotides in length.
   304. The method of embodiment 287, wherein the PEgRNA has a nucleotide sequence selected from the group consisting of SEQ ID NOs: 101-104, 181-183, 223-234, 237-244, 277, 324-330, 332, 334, 336, 338, 340, 342, 344, 346, 348, 350, 352, 354, 356, 358, 360, 362, 364, 366, 368, 394, 429-442, 499-505, 641-649, 678-692, 735-736, 757-761, 776-777, 2997-3103, 3113-3121, 3305-3455, 3479-3493, 3522-3540, 3549-3556, 3628-3698, 3755-3810, 3874, 3890-3901, 3905-3911, 3913-3929, 3972-3989.
   305. A method for introducing one or more changes in the nucleotide sequence of a DNA molecule at a target locus, comprising:
[2044] (i) contacting the DNA molecule with a nucleic acid programmable DNA binding protein (napDNAbp) and a PEgRNA which targets the napDNAbp to the target locus, wherein the PEgRNA comprises a reverse transcriptase (RT) template sequence comprising at least one desired nucleotide change and a primer binding site;
[2045] (ii) forming an exposed 3′ end in a DNA strand at the target locus;
[2046] (iii) hybridizing the exposed 3′ end to the primer binding site to prime reverse transcription;
[2047] (iv) synthesizing a single strand DNA flap comprising the at least one desired nucleotide change based on the RT template sequence by reverse transcriptase;
[2048] (v) and incorporating the at least one desired nucleotide change into the corresponding endogenous DNA, thereby introducing one or more changes in the nucleotide sequence of the DNA molecule at the target locus.
   306. The method of embodiment 305, wherein the one or more changes in the nucleotide sequence comprises a transition.
   307. The method of embodiment 306, wherein the transition is selected from the group consisting of: (a) T to C; (b) A to G; (c) C to T; and (d) G to A.
   308. The method of embodiment 305, wherein the one or more changes in the nucleotide sequence comprises a transversion.
   309. The method of embodiment 308, wherein the transversion is selected from the group consisting of: (a) T to A; (b) T to G; (c) C to G; (d) C to A; (e) A to T; (f) A to C; (g) G to C; and (h) G to T.
   310. The method of embodiment 305, wherein the one or more changes in the nucleotide sequence comprises changing (1) a G:C basepair to a T:A basepair, (2) a G:C basepair to an A:T basepair, (3) a G:C basepair to C:G basepair, (4) a T:A basepair to a G:C basepair, (5) a T:A basepair to an A:T basepair, (6) a T:A basepair to a C:G basepair, (7) a C:G basepair to a G:C basepair, (8) a C:G basepair to a T:A basepair, (9) a C:G basepair to an A:T basepair, (9) an A:T basepair to a T:A basepair, (11) an A:T basepair to a G:C basepair, or (12) an A:T basepair to a C:G basepair.
   311. The method of embodiment 305, wherein the one or more changes in the nucleotide sequence comprises an insertion or deletion of 1, 2, 3, 4, 5, 6, 7, 8, 9, 10, 11, 12, 13, 14, 15, 16, 17, 18, 19, 20, 21, 22, 23, 24, or 25 nucleotides.
   312. The method of embodiment 305, wherein the one or more changes in the nucleotide sequence comprises a correction to a disease-associated gene.
   313. The method of embodiment 312, wherein the disease-associated gene is associated with a monogentic disorder selected from the group consisting of: Adenosine Deaminase (ADA) Deficiency; Alpha-1 Antitrypsin Deficiency; Cystic Fibrosis; Duchenne Muscular Dystrophy; Galactosemia; Hemochromatosis; Huntington's Disease; Maple Syrup Urine Disease; Marfan Syndrome; Neurofibromatosis Type 1; Pachyonychia Congenita; Phenylkeotnuria; Severe Combined Immunodeficiency; Sickle Cell Disease; Smith-Lemli-Opitz Syndrome; a trinucleotide repeat disorder; a prion disease; and Tay-Sachs Disease.
   314. The method of embodiment 312, wherein the disease-associated gene is associated with a polygenic disorder selected from the group consisting of: heart disease; high blood pressure; Alzheimer's disease; arthritis; diabetes; cancer; and obesity.
   315. The method of embodiment 305, wherein the napDNAbp is a nuclease active Cas9 or variant thereof.
   316. The method of embodiment 305, wherein the napDNAbp is a nuclease inactive Cas9 (dCas9) or Cas9 nickase (nCas9), or a variant thereof.
   317. The method of embodiment 305, wherein the napDNAbp comprises an amino acid sequence of SEQ ID NO: 18, or an amino acid sequence having at least 80%, 85%, 90%, 95%, 98%, or 99% sequence identity with SEQ ID NO: 18.
   318. The method of embodiment 305, wherein the napDNAbp comprises an amino acid sequence having at least 80%, 85%, 90%, 95%, 98%, or 99% sequence identity with the amino acid sequence of any one of SEQ ID NOs: 18-88, 126, 130, 137, 141, 147, 153, 157, 445, 460, 467, and 482-487.
   319. The method of embodiment 305, wherein the reverse transcriptase is introduced in trans.
   320. The method of embodiment 305, wherein the napDNAbp comprises a fusion to a reverse transcriptase.
   321. The method of embodiment 305, wherein the reverse transcriptase comprises any one of the amino acid sequences of SEQ ID NOs: 89-100, 105-122, 128-129, 132, 139, 143, 149, 154, 159, 235, 454, 471, 516, 662, 700, 701-716, 739-741, and 766.
   322. The method of embodiment 305, wherein the reverse transcriptase comprises an amino acid sequence having at least 80%, 85%, 90%, 95%, 98%, or 99% sequence identity with the amino acid sequence of any one of SEQ ID NOs: 89-100, 105-122, 128-129, 132, 139, 143, 149, 154, 159, 235, 454, 471, 516, 662, 700, 701-716, 739-741, and 766.
   323. The method of embodiment 305, wherein the step of forming an exposed 3′ end in the DNA strand at the target locus comprises nicking the DNA strand with a nuclease.
   324. The method of embodiment 323, wherein the nuclease is provided is provided in trans.
   325. The method of embodiment 305, wherein the step of forming an exposed 3′ end in the DNA strand at the target locus comprises contacting the DNA strand with a chemical agent.
   326. The method of embodiment 305, wherein the step of forming an exposed 3′ end in the DNA strand at the target locus comprises introducing a replication error.
   327. The method of embodiment 305, wherein the step of contacting the DNA molecule with the napDNAbp and the guide RNA forms an R-loop.
   328. The method of embodiment 327, wherein the DNA strand in which the exposed 3′ end is formed is in the R-loop.
   329. The method of embodiment 315, wherein the PEgRNA comprises an extension arm that comprises the reverse transcriptase (RT) template sequence and the primer binding site.
   330. The method of embodiment 329, wherein the extension arm is at the 3′ end of the guide RNA, the 5′ end of the guide RNA, or at an intramolecular position in the guide RNA.
   331. The method of embodiment 305, wherein the PEgRNA further comprises at least one additional structure selected from the group consisting of a linker, a stem loop, a hairpin, a toeloop, an aptamer, or an RNA-protein recruitment domain.
   332. The method of embodiment 305, wherein the PEgRNA further comprises a homology arm.
   333. The method of embodiment 305, wherein the RT template sequence is homologous to the corresponding endogenous DNA.
   334. A method for introducing one or more changes in the nucleotide sequence of a DNA molecule at a target locus by target-primed reverse transcription, the method comprising: (a) contacting the DNA molecule at the target locus with a (i) fusion protein comprising a nucleic acid programmable DNA binding protein (napDNAbp) and a reverse transcriptase and (ii) a guide RNA comprising an RT template comprising a desired nucleotide change; (b) conducting target-primed reverse transcription of the RT template to generate a single strand DNA comprising the desired nucleotide change; and (c) incorporating the desired nucleotide change into the DNA molecule at the target locus through a DNA repair and/or replication process.
   335. The method of embodiment 334, wherein the RT template is located at the 3′ end of the guide RNA, the 5′ end of the guide RNA, or at an intramolecular location in the guide RNA.
   336. The method of embodiment 334, wherein the desired nucleotide change comprises a transition, a transversion, an insertion, or a deletion, or any combination thereof.
   337. The method of embodiment 334, wherein the desired nucleotide change comprises a transition selected from the group consisting of: (a) T to C; (b) A to G; (c) C to T; and (d) G to A.
   338. The method of claim 334, wherein the desired nucleotide change comprises a transversion selected from the group consisting of: (a) T to A; (b) T to G; (c) C to G; (d) C to A; (e) A to T; (f) A to C; (g) G to C; and (h) G to T.
   339. The method of embodiment 334, wherein the desired nucleotide change comprises changing (1) a G:C basepair to a T:A basepair, (2) a G:C basepair to an A:T basepair, (3) a G:C basepair to C:G basepair, (4) a T:A basepair to a G:C basepair, (5) a T:A basepair to an A:T basepair, (6) a T:A basepair to a C:G basepair, (7) a C:G basepair to a G:C basepair, (8) a C:G basepair to a T:A basepair, (9) a C:G basepair to an A:T basepair, (10) an A:T basepair to a T:A basepair, (11) an A:T basepair to a G:C basepair, or (12) an A:T basepair to a C:G basepair.
   340. A polynucleotide encoding the PEgRNA of any one of embodiments 243-259.
   341. A vector comprising the polynucleotide of embodiment 340.
   342. A cell comprising the vector of embodiment 341.
   343. The fusion protein of embodiment 213, wherein the polymerase is an error-prone reverse transcriptase.
   344. A method for mutagenizing a DNA molecule at a target locus by target-primed reverse transcription, the method comprising: (a) contacting the DNA molecule at the target locus with a (i) fusion protein comprising a nucleic acid programmable DNA binding protein (napDNAbp) and an error-prone reverse transcriptase and (ii) a guide RNA comprising an RT template comprising a desired nucleotide change; (b) conducting target-primed reverse transcription of the RT template to generate a mutagenized single strand DNA; and (c) incorporating the mutagenized single strand DNA into the DNA molecule at the target locus through a DNA repair and/or replication process.
   345. The method of any prior embodiment, wherein the fusion protein comprises the amino acid sequence of PE1, PE2, or PE3.
   346. The method of any prior embodiment, wherein the napDNAbp is a Cas9 nickase (nCas9).
   347. The method of embodiment 344, wherein the napDNAbp comprises the amino acid sequence of SEQ ID NOs: 18-88, 126, 130, 137, 141, 147, 153, 157, 445, 460, 467, and 482-487.
   348. The method of embodiment 344, wherein the guide RNA comprises SEQ ID NO: 222.
   349. The method of embodiment 344, wherein the step of (b) conducting target-primed reverse transcription comprises generating a 3′ end primer binding sequence at the target locus that is capable of priming reverse transcription by annealing to a primer binding site on the guide RNA.
   350. A method for replacing a trinucleotide repeat expansion mutation in a target DNA molecule with a healthy sequence comprising a healthy number of repeat trinucleotides, the method comprising: (a) contacting the DNA molecule at the target locus with a (i) fusion protein comprising a nucleic acid programmable DNA binding protein (napDNAbp) and a polymerase and (ii) a PEgRNA comprising DNA synthesis template comprising the replacement sequence and a primer binding site; (b) conducting prime editing to generate a single strand DNA comprising the replacement sequence; and (c) incorporating the single strand DNA into the DNA molecule at the target locus through a DNA repair and/or replication process.
   351. The method of embodiment 350, wherein the fusion protein comprises the amino acid sequence of PE1, PE2, or PE3.
   352. The method of embodiment 350, wherein the napDNAbp is a Cas9 nickase (nCas9).
   353. The method of embodiment 350, wherein the napDNAbp comprises the amino acid sequence of SEQ ID NOs: 18-88, 126, 130, 137, 141, 147, 153, 157, 445, 460, 467, and 482-487.
   354. The method of embodiment 350, wherein the guide RNA comprises SEQ ID NO: 222.
   355. The method of embodiment 350, wherein the step of (b) conducting prime editing comprises generating a 3′ end primer binding sequence at the target locus that is capable of priming polymerase by annealing to the primer binding site on the guide RNA.
   356. The method of embodiment 350, wherein the trinucleotide repeat expansion mutation is associated with Huntington's Disease, Fragile X syndrome, or Friedreich's ataxia.
   357. The method of embodiment 350, wherein the trinucleotide repeat expansion mutation comprises a repeating unit of CAG triplets.
   358. The method of embodiment 350, wherein the trinucleotide repeat expansion mutation comprises a repeating unit of GAA triplets.
   359. A method of installing a functional moiety in a protein of interest encoded by a target nucleotide sequence by prime editing, the method comprising: (a) contacting the target nucleotide sequence with a (i) prime editor comprising a nucleic acid programmable DNA binding protein (napDNAbp) and a polymerase and (ii) a PEgRNA comprising DNA synthesis template encoding the functional moiety; (b) polymerizing a single strand DNA sequence encoding the functional moiety; and (c) incorporating the single strand DNA sequence in place of a corresponding endogenous strand at the target nucleotide sequence through a DNA repair and/or replication process, wherein the method produces a recombinant target nucleotide sequence that encodes a fusion protein comprising the protein of interest and the functional moiety.
   360. The method of embodiment 359, wherein functional moiety is peptide tag.
   361. The method of embodiment 360, wherein the peptide tag is an affinity tag, solubilization tag, chromatography tag, epitope or immunoepitope tag, or a fluorescence tag.
   362. The method of embodiment 360, wherein the peptide tag is selected from the group consisting of: AviTag (SEQ ID NO: 245); C-tag (SEQ ID NO: 246); Calmodulin-tag (SEQ ID NO: 247); polyglutamate tag (SEQ ID NO: 248); E-tag (SEQ ID NO: 249); FLAG-tag (SEQ ID NO: 2); HA-tag (SEQ ID NO: 5); His-tag (SEQ ID NOs: 252-262); Myc-tag (SEQ ID NO: 6); NE-tag (SEQ ID NO: 264); Rho1D4-tag (SEQ ID NO: 265); S-tag (SEQ ID NO: 266); SBP-tag (SEQ ID NO: 267); Softag-1 (SEQ ID NO: 268); Softag-2 (SEQ ID NO: 269); Spot-tag (SEQ ID NO: 270); Strep-tag (SEQ ID NO: 271); TC tag (SEQ ID NO: 272); Ty tag

### (SEQ ID NO: 273); V5 tag (SEQ ID NO: 3); VSV-tag (SEQ ID NO: 275); and Xpress tag (SEQ ID NO: 276).

[2049] 363. The method of embodiment 360, wherein the peptide tag is selected from the group consisting of: AU1 epitope (SEQ ID NO: 278); AU5 epitope (SEQ ID NO: 279); Bacteriophage T7 epitope (T7-tag) (SEQ ID NO: 280); Bluetongue virus tag (B-tag) (SEQ ID NO: 281); E2 epitope (SEQ ID NO: 282); Histidine affinity tag (HAT) (SEQ ID NO: 283); HSV epitope (SEQ ID NO: 284); Polyarginine (Arg-tag) (SEQ ID NO: 285); Polyaspartate (Asp-tag) (SEQ ID NO: 286); Polyphenylalanine (Phe-tag) (SEQ ID NO: 287); S1-tag (SEQ ID NO: 288); S-tag (SEQ ID NO: 266); and VSV-tag (SEQ ID NO: 275).
364. The method of embodiment 359, wherein the functional moiety is an immunoepitope.
365. The method of embodiment 364, wherein the immunoepitope is selected from the group consisting of: tetanus toxoid (SEQ ID NO: 396); diphtheria toxin mutant CRM197 (SEQ ID NO: 398); mumps immunoepitope 1 (SEQ ID NO: 400); mumps immunoepitope 2 (SEQ ID NO: 402); mumps immunoeptitope 3 (SEQ ID NO: 404); rubella virus (SEQ ID NO: 406); hemagglutinin (SEQ ID NO: 408); neuraminidase (SEQ ID NO: 410); TAP1 (SEQ ID NO: 412); TAP2 (SEQ ID NO: 414); hemagglutinin epitopes toward class I HLA (SEQ ID NO: 416); neuraminidase epitopes toward class I HLA (SEQ ID NO: 418); hemagglutinin epitopes toward class II HLA (SEQ ID NO: 420); neuraminidase epitopes toward class II HLA (SEQ ID NO: 422); hemagglutinin epitope H5N1-bound class I and class II HLA (SEQ ID NO: 424); neuraminidase epitope H5N1-bound class I and class II HLA (SEQ ID NO: 426).
366. The method of embodiment 359, wherein the functional moiety alters the localization of the protein of interest.
367. The method of embodiment 359, wherein the functional moiety is a degradation tag such that the degradation rate of the protein of interest is altered.
368. The method of embodiment 367, wherein the degradation tag results in the elimination of the tagged protein.
369. The method of embodiment 359, wherein the functional moiety is a small molecule binding domain.
370. The method of embodiment 359, wherein the small molecule binding domain is FKBP12 of SEQ ID NO: 488.
371. The method of embodiment 359, wherein the small molecule binding domain is FKBP12-F36V of SEQ ID NO: 489.
372. The method of embodiment 359, wherein the small molecule binding domain is cyclophilin of SEQ ID NOs: 490 and 493-494.
373. The method of embodiment 359, wherein the small molecule binding domain is installed in two or more proteins of interest.
374. The method of embodiment 373, wherein the two or more proteins of interest may dimerize upon contacting with a small molecule.
375. The method of embodiment 369, wherein the small molecule is a dimer of a small molecule selected from the group consisting of:

[chemical structure]

[chemical structure]

376. A method of installing an immunoepitope in a protein of interest encoded by a target nucleotide sequence by prime editing, the method comprising: (a) contacting the target nucleotide sequence with a (i) prime editor comprising a nucleic acid programmable DNA binding protein (napDNAbp) and a polymerase and (ii) a PEgRNA comprising an edit template encoding the functional moiety; (b) polymerizing a single strand DNA sequence encoding the immunoepitope; and (c) incorporating the single strand DNA sequence in place of a corresponding endogenous strand at the target nucleotide sequence through a DNA repair and/or replication process, wherein the method produces a recombinant target nucleotide sequence that encodes a fusion protein comprising the protein of interest and the immunoepitope.
377. The method of embodiment 376, wherein the immunoepitope is selected from the group consisting of: tetanus toxoid (SEQ ID NO: 396); diphtheria toxin mutant CRM197 (SEQ ID NO: 398); mumps immunoepitope 1 (SEQ ID NO: 400); mumps immunoepitope 2 (SEQ ID NO: 402); mumps immunoeptitope 3 (SEQ ID NO: 404); rubella virus (SEQ ID NO: 406); hemagglutinin (SEQ ID NO: 408); neuraminidase (SEQ ID NO: 410); TAP1 (SEQ ID NO: 412); TAP2 (SEQ ID NO: 414); hemagglutinin epitopes toward class I HLA (SEQ ID NO: 416); neuraminidase epitopes toward class I HLA (SEQ ID NO: 418); hemagglutinin epitopes toward class II HLA (SEQ ID NO: 420); neuraminidase epitopes toward class II HLA (SEQ ID NO: 422); hemagglutinin epitope H5N1-bound class I and class II HLA (SEQ ID NO: 424); neuraminidase epitope H5N1-bound class I and class II HLA (SEQ ID NO: 426).
378. The method of embodiment 376, wherein the fusion protein comprises the amino acid sequence of PE1, PE2, or PE3.
379. The method of embodiment 376, wherein the napDNAbp is a Cas9 nickase (nCas9).
380. The method of embodiment 376, wherein the napDNAbp comprises the amino acid sequence of SEQ ID NOs: 18-88, 126, 130, 137, 141, 147, 153, 157, 445, 460, 467, and 482-487.
381. The method of embodiment 376, wherein the PEgRNA comprises SEQ ID NOs: 101-104, 181-183, 223-234, 237-244, 277, 324-330, 332, 334, 336, 338, 340, 342, 344, 346, 348, 350, 352, 354, 356, 358, 360, 362, 364, 366, 368, 394, 429-442, 499-505, 641-649, 678-692, 735-736, 757-761, 776-777, 2997-3103, 3113-3121, 3305-3455, 3479-3493, 3522-3540, 3549-3556, 3628-3698, 3755-3810, 3874, 3890-3901, 3905-3911, 3913-3929, 3972-3989.
382. A method of installing a small molecule dimerization domain in a protein of interest encoded by a target nucleotide sequence by prime editing, the method comprising: (a) contacting the target nucleotide sequence with a (i) prime editor comprising a nucleic acid programmable DNA binding protein (napDNAbp) and a polymerase and (ii) a PEgRNA comprising an edit template encoding the small molecule dimerization domain; (b) polymerizing a single strand DNA sequence encoding the immunoepitope; and (c) incorporating the single strand DNA sequence in place of a corresponding endogenous strand at the target nucleotide sequence through a DNA repair and/or replication process, wherein the method produces a recombinant target nucleotide sequence that encodes a fusion protein comprising the protein of interest and the small molecule dimerization domain.
383. The method of embodiment 382, further comprising conducting the method on a second protein of interest.
384. The method of embodiment 383, wherein the first protein of interest and the second protein of interest dimerize in the presence of a small molecule that binds to the dimerization domain on each of said proteins.
385. The method of embodiment 382, wherein the small molecule binding domain is FKBP12 of SEQ ID NO: 488.
386. The method of embodiment 382, wherein the small molecule binding domain is FKBP12-F36V of SEQ ID NO: 489.
387. The method of embodiment 382, wherein the small molecule binding domain is cyclophilin of SEQ ID NOs: 490 and 493-494.
388. The method of embodiment 382, wherein the small molecule is a dimer of a small molecule selected from the group consisting of:

[chemical structure]

[chemical structure]

389. The method of embodiment 382, wherein the fusion protein comprises the amino acid sequence of PE1, PE2, or PE3.
390. The method of embodiment 382, wherein the napDNAbp is a Cas9 nickase (nCas9).
391. The method of embodiment 382, wherein the napDNAbp comprises the amino acid sequence of SEQ ID NOs: 18-88, 126, 130, 137, 141, 147, 153, 157, 445, 460, 467, and 482-487.
392. The method of embodiment 382, wherein the PEgRNA comprises SEQ ID NOs: 101-104, 181-183, 223-234, 237-244, 277, 324-330, 332, 334, 336, 338, 340, 342, 344, 346, 348, 350, 352, 354, 356, 358, 360, 362, 364, 366, 368, 394, 429-442, 499-505, 641-649, 678-692, 735-736, 757-761, 776-777, 2997-3103, 3113-3121, 3305-3455, 3479-3493, 3522-3540, 3549-3556, 3628-3698, 3755-3810, 3874, 3890-3901, 3905-3911, 3913-3929, 3972-3989.
393. A method of installing a peptide tag or epitope onto a protein using prime editing, comprising: contacting a target nucleotide sequence encoding the protein with a prime editor construct configured to insert therein a second nucleotide sequence encoding the peptide tag to result in a recombinant nucleotide sequence, such that the peptide tag and the protein are expressed from the recombinant nucleotide sequence as a fusion protein.
394. The method of embodiment 383, wherein the peptide tag is used for purification and/or detection of the protein.
395. The method of embodiment 383, wherein the peptide tag is a poly-histidine (e.g., HHHHHH (SEQ ID NO: 252-262)), FLAG (e.g., DYKDDDDK (SEQ ID NO: 2)), V5 (e.g., GKPIPNPLLGLDST (SEQ ID NO: 3)), GCN4, HA (e.g., YPYDVPDYA (SEQ ID NO: 5)), Myc (e.g. EQKLISEED (SEQ ID NO: 6)), or GST.
396. The method of embodiment 383, wherein the peptide tag has an amino acid sequence selected from the group consisting of SEQ ID NO: 245-290.
397. The method of embodiment 383, wherein the peptide tag is fused to the protein by a linker.
398. The method of embodiment 383, wherein the fusion protein has the following structure: [protein]-[peptide tag] or [peptide tag]-[protein], wherein “]-[” represents an optional linker.
399. The method of embodiment 383, wherein the linker has an amino acid sequence of SEQ ID NOs: 127, 165-176, 446, 453, and 767-769.
400. The method of embodiment 383, wherein the prime editor construct comprises a PEgRNA comprising the nucleotide sequence of SEQ ID NOs: 18-101-104, 181-183, 223-234, 237-244, 277, 324-330, 332, 334, 336, 338, 340, 342, 344, 346, 348, 350, 352, 354, 356, 358, 360, 362, 364, 366, 368, 394, 429-442, 499-505, 641-649, 678-692, 735-736, 757-761, 776-777, 2997-3103, 3113-3121, 3305-3455, 3479-3493, 3522-3540, 3549-3556, 3628-3698, 3755-3810, 3874, 3890-3901, 3905-3911, 3913-3929, 3972-3989.
401. The method of embodiment 383, wherein the PEgRNA comprises a spacer, a gRNA core, and an extension arm, wherein the spacer is complementary to the target nucleotide sequence and the extension arm comprises a reverse transcriptase template that encodes the peptide tag.
402. The method of embodiment 383, wherein the PEgRNA comprises a spacer, a gRNA core, and an extension arm, wherein the spacer is complementary to the target nucleotide sequence and the extension arm comprises a reverse transcriptase template that encodes the peptide tag.
403. A method of preventing or halting the progression of a prion disease by installing on or more protective mutations into PRNP encoded by a target nucleotide sequence by prime editing, the method comprising: (a) contacting the target nucleotide sequence with a (i) prime editor comprising a nucleic acid programmable DNA binding protein (napDNAbp) and a polymerase and (ii) a PEgRNA comprising an edit template encoding the functional moiety; (b) polymerizing a single strand DNA sequence encoding the protective mutation; and (c) incorporating the single strand DNA sequence in place of a corresponding endogenous strand at the target nucleotide sequence through a DNA repair and/or replication process, wherein the method produces a recombinant target nucleotide sequence that encodes a PRNP comprising a protective mutation and which is resistant to misfolding.
404. The method of embodiment 403, wherein the prion disease is a human prion disease.
405. The method of embodiment 403, wherein the prion disease is an animal prion disease.
406. The method of embodiment 404, wherein the prion disease is Creutzfeldt-Jakob Disease (CJD), Variant Creutzfeldt-Jakob Disease (νCJD), Gerstmann-Straussler-Scheinker Syndrome, Fatal Familial Insomnia, or Kuru.
407. The method of embodiment 403, wherein the prion disease is Bovine Spongiform Encephalopathy (BSE or “mad cow disease”), Chronic Wasting Disease (CWD), Scrapie, Transmissible Mink Encephalopathy, Feline Spongiform Encephalopathy, and Ungulate Spongiform Encephalopathy.
408. The method of embodiment 403, wherein the wildtype PRNP amino acid sequence is SEQ ID NOs: 291-292.
409. The method of embodiment 403, wherein the method results in a modified PRNP amino acid sequence selected from the group consisting of SEQ ID NOs: 293-323, wherein said modified PRNP protein is resistant to misfolding.
410. The method of embodiment 403, wherein the fusion protein comprises the amino acid sequence of PE1, PE2, or PE3.
411. The method of embodiment 403, wherein the napDNAbp is a Cas9 nickase (nCas9).
412. The method of embodiment 403, wherein the napDNAbp comprises the amino acid sequence of SEQ ID NOs:18-88, 126, 130, 137, 141, 147, 153, 157, 445, 460, 467, and 482-487.
413. The method of embodiment 403, wherein the PEgRNA comprises SEQ ID NOs: 101-104, 181-183, 223-234, 237-244, 277, 324-330, 332, 334, 336, 338, 340, 342, 344, 346, 348, 350, 352, 354, 356, 358, 360, 362, 364, 366, 368, 394, 429-442, 499-505, 641-649, 678-692, 735-736, 757-761, 776-777, 2997-3103, 3113-3121, 3305-3455, 3479-3493, 3522-3540, 3549-3556, 3628-3698, 3755-3810, 3874, 3890-3901, 3905-3911, 3913-3929, 3972-3989.
414. A method of installing a ribonucleotide motif or tag in an RNA of interest encoded by a target nucleotide sequence by prime editing, the method comprising: (a) contacting the target nucleotide sequence with a (i) prime editor comprising a nucleic acid programmable DNA binding protein (napDNAbp) and a polymerase and (ii) a PEgRNA comprising an edit template encoding the ribonucleotide motif or tag; (b) polymerizing a single strand DNA sequence encoding the ribonucleotide motif or tag; and (c) incorporating the single strand DNA sequence in place of a corresponding endogenous strand at the target nucleotide sequence through a DNA repair and/or replication process, wherein the method produces a recombinant target nucleotide sequence that encodes a modified RNA of interest comprising the ribonucleotide motif or tag.
415. The method of embodiment 414, wherein ribonucleotide motif or tag is a detection moiety.
416. The method of embodiment 414, wherein the ribonucleotide motif or tag affects the expression level of the RNA of interest.
417. The method of embodiment 414, wherein the ribonucleotide motif or tag affects the transport or subcellular location of the RNA of interest.
418. The method of embodiment 414, wherein the ribonucleotide motif or tag is selected from the group consisting of SV40 type 1, SV40 type 2, SV40 type 3, hGH, BGH, rbGlob, TK, MALAT1 ENE-mascRNA, KSHV PAN ENE, Smbox/U1 snRNA box, U1 snRNA 3′ box, tRNA-lysine, broccoli aptamer, spinach aptamer, mango aptamer, HDV ribozyme, and m6A.
419. The method of embodiment 414, wherein the PEgRNA comprises SEQ ID NOs: 18-88, 126, 130, 137, 141, 147, 153, 157, 445, 460, 467, and 482-487.
420. The method of embodiment 414, wherein the fusion protein comprises the amino acid sequence of PE1, PE2, or PE3.
421. The method of embodiment 414, wherein the napDNAbp is a Cas9 nickase (nCas9).
422. The method of embodiment 414, wherein the napDNAbp comprises the amino acid sequence of SEQ ID NOs: 18-88, 126, 130, 137, 141, 147, 153, 157, 445, 460, 467, and 482-487.
423. A method of installing or deleting a functional moiety in a protein of interest encoded by a target nucleotide sequence by prime editing, the method comprising: (a) contacting the target nucleotide sequence with a (i) prime editor comprising a nucleic acid programmable DNA binding protein (napDNAbp) and a polymerase and (ii) a PEgRNA comprising an edit template encoding the functional moiety or deletion of same; (b) polymerizing a single strand DNA sequence encoding the functional moiety or deletion of same; and (c) incorporating the single strand DNA sequence in place of a corresponding endogenous strand at the target nucleotide sequence through a DNA repair and/or replication process, wherein the method produces a recombinant target nucleotide sequence that encodes a modified protein comprising the protein of interest and the functional moiety or the removal of same, wherein the functional moiety alters a modification state or localization state of the protein.
424. The method of embodiment 423, wherein functional moiety alters the phosphorylation, ubiquitylation, glycosylation, lipidation, hydroxylation, methylation, acetylation, crotonylation, SUMOylation state of the protein of interest.

### Group A. Fusion Proteins, Guides, and Methods

[2050] Embodiment 1. A fusion protein comprising a nucleic acid programmable DNA binding protein (napDNAbp) and a reverse transcriptase.

[2051] Embodiment 2. The fusion protein of embodiment 1, wherein the fusion protein is capable of carrying out genome editing by target-primed reverse transcription in the presence of an extended guide RNA.

[2052] Embodiment 3. The fusion protein of embodiment 1, wherein the napDNAbp has a nickase activity.

[2053] Embodiment 4. The fusion protein of embodiment 1, wherein the napDNAbp is a Cas9 protein or variant thereof.

[2054] Embodiment 5. The fusion protein of embodiment 1, wherein the napDNAbp is a nuclease active Cas9, a nuclease inactive Cas9 (dCas9), or a Cas9 nickase (nCas9).

[2055] Embodiment 6. The fusion protein of embodiment 1, wherein the napDNAbp is Cas9 nickase (nCas9).

[2056] Embodiment 7. The fusion protein of embodiment 1, wherein the napDNAbp is selected from the group consisting of: Cas9, CasX, CasY, Cpf1, C2c1, C2c2, C2C3, and Argonaute and optionally has a nickase activity.

[2057] Embodiment 8. The fusion protein of embodiment 1, wherein the fusion protein when complexed with an extended guide RNA is capable of binding to a target DNA sequence.

[2058] Embodiment 9. The fusion protein of embodiment 8, wherein the target DNA sequence comprises a target strand and a complementary non-target strand.

[2059] Embodiment 10. The fusion protein of embodiment 8, wherein the binding of the fusion protein complexed to the extended guide RNA forms an R-loop.

[2060] Embodiment 11. The fusion protein of embodiment 10, wherein the R-loop comprises (i) an RNA-DNA hybrid comprising the extended guide RNA and the target strand, and (ii) the complementary non-target strand.

[2061] Embodiment 12. The fusion protein of embodiment 11, wherein the complementary non-target strand is nicked to form a reverse transcriptase priming sequence having a free 3′ end.

[2062] Embodiment 13. The fusion protein of embodiment 2, wherein the extended guide RNA comprises (a) a guide RNA, and (b) an RNA extension at the 5′ or the 3′ end of the guide RNA, or at an intramolecular location in the guide RNA.

[2063] Embodiment 14. The fusion protein of embodiment 13, wherein the RNA extension comprises (i) a reverse transcription template sequence comprising a desired nucleotide change, (ii) a reverse transcription primer binding site, and (iii) optionally, a linker sequence.

[2064] Embodiment 15. The fusion protein of embodiment 14, wherein the reverse transcription template sequence encodes a single-strand DNA flap that is complementary to an endogenous DNA sequence adjacent to the nick site, wherein the single-strand DNA flap comprises the desired nucleotide change.

[2065] Embodiment 16. The fusion protein of embodiment 13, wherein the RNA extension is at least 5 nucleotides, at least 6 nucleotides, at least 7 nucleotides, at least 8 nucleotides, at least 9 nucleotides, at least 10 nucleotides, at least 11 nucleotides, at least 12 nucleotides, at least 13 nucleotides, at least 14 nucleotides, at least 15 nucleotides, at least 16 nucleotides, at least 17 nucleotides, at least 18 nucleotides, at least 19 nucleotides, at least 20 nucleotides, at least 21 nucleotides, at least 22 nucleotides, at least 23 nucleotides, at least 24 nucleotides, or at least 25 nucleotides in length.

[2066] Embodiment 17. The fusion protein of embodiment 15, wherein the single-strand DNA flap hybridizes to the endogenous DNA sequence adjacent to the nick site, thereby installing the desired nucleotide change.

[2067] Embodiment 18. The fusion protein of embodiment 15, wherein the single-stranded DNA flap displaces the endogenous DNA sequence adjacent to the nick site and which has a free 5′ end.

[2068] Embodiment 19. The fusion protein of embodiment 18, wherein the endogenous DNA sequence having the 5′ end is excised by the cell.

[2069] Embodiment 20. The fusion protein of embodiment 18, wherein cellular repair of the single-strand DNA flap results in installation of the desired nucleotide change, thereby forming a desired product.

[2070] Embodiment 21. The fusion protein of embodiment 14, wherein the desired nucleotide change is installed in an editing window that is between about −4 to +10 of the PAM sequence, or between about −10 to +20 of the PAM sequence, or between about −20 to +40 of the PAM sequence, or between about −30 to +100 of the PAM sequence, or wherein the desired nucleotide change is installed at least 1, 2, 3, 4, 5, 6, 7, 8, 9, 10, 11, 12, 13, 14, 15, 16, 17, 18, 19, 20, 21, 22, 23, 24, 25, 26, 27, 28, 29, 30, 31, 32, 33, 34, 35, 36, 37, 38, 39, 40, 41, 42, 43, 44, 45, 46, 47, 48, 49, 50, 51, 52, 53, 54, 55, 56, 57, 58, 59, 60, 61, 62, 63, 64, 65, 66, 67, 68, 69, 70, 71, 72, 73, 74, 75, 76, 77, 78, 79, 80, 81, 82, 83, 84, 85, 86, 87, 88, 89, 90, 91, 92, 93, 94, 95, 96, 97, 98, 99, or 100 nucleotides downstream of the nick site.

[2071] Embodiment 22. The fusion protein of embodiment 1, wherein the napDNAbp comprises an amino acid sequence of SEQ ID NO: 18, or an amino acid sequence that is at least 80%, 85%, 90%, 95%, 98%, or 99% identical to the amino acid sequence to SEQ ID NO: 18.

[2072] Embodiment 23. The fusion protein of embodiment 1, wherein the napDNAbp comprises an amino acid sequence that is at least 80%, 85%, 90%, 95%, 98%, or 99% identical to the amino acid sequence of any one of SEQ ID NOs: 18-88, 126, 130, 137, 141, 147, 153, 157, 445, 460, 467, and 482-487.

[2073] The fusion protein of embodiment 1, wherein the reverse transcriptase comprises any one of the amino acid sequences of SEQ ID NO: 89.

[2074] Embodiment 24. The fusion protein of embodiment 1, wherein the reverse transcriptase comprises any one of the amino acid sequences of SEQ ID NOs: 89-100, 105-122, 128-129, 132, 139, 143, 149, 154, 159, 235, 454, 471, 516, 662, 700, 701-716, 739-741, and 766.

[2075] The fusion protein of embodiment 1, wherein the reverse transcriptase comprises an amino acid sequence that is at least 80%, 85%, 90%, 95%, 98%, or 99% identical to the amino acid sequence of any one of SEQ ID NO: 89.

[2076] Embodiment 25. The fusion protein of embodiment 1, wherein the reverse transcriptase comprises an amino acid sequence that is at least 80%, 85%, 90%, 95%, 98%, or 99% identical to the amino acid sequence of any one of SEQ ID NOs: 89-100, 105-122, 128-129, 132, 139, 143, 149, 154, 159, 235, 454, 471, 516, 662, 700, 701-716, 739-741, and 766.

[2077] Embodiment 26. The fusion protein of embodiment 1, wherein the reverse transcriptase is a naturally-occurring reverse transcriptase from a retrovirus or a retrotransposon.

[2078] Embodiment 27. The fusion protein of any one of the previous embodiments, wherein the fusion protein comprises the structure NH₂-[napDNAbp]-[reverse transcriptase]-COOH; or NH₂-[reverse transcriptase]-[napDNAbp]-COOH, wherein each instance of “]-[” indicates the presence of an optional linker sequence.

[2079] Embodiment 28. The fusion protein of embodiment 27, wherein the linker sequence comprises an amino acid sequence of SEQ ID NOs: 127, 165-176, 446, 453, and 767-769.

[2080] Embodiment 29. The fusion protein of embodiment 14, wherein the desired nucleotide change is a single nucleotide change, an insertion of one or more nucleotides, or a deletion of one or more nucleotides.

[2081] Embodiment 30. The fusion protein of embodiment 29, wherein the insert or deletion is at least 1, at least 2, at least 3, at least 4, at least 5, at least 6, at least 7, at least 8, at least 9, at least 10, at least 11, at least 12, at least 13, at least 14, at least 15, at least 16, at least 17, at least 18, at least 19, at least 20, at least 21, at least 22, at least 23, at least 24, at least 25, at least 26, at least 27, at least 28, at least 29, at least 30, at least 31, at least 32, at least 33, at least 34, at least 35, at least 36, at least 37, at least 38, at least 39, at least 40, at least 41, at least 42, at least 43, at least 44, at least 45, at least 46, at least 47, at least 48, at least 49, or at least 50.

[2082] Embodiment 31. An extended guide RNA comprising a guide RNA and at least one RNA extension.

[2083] Embodiment 32. The extended guide RNA of embodiment 1, wherein the RNA extension is position at the 3′ or 5′ end of the guide RNA, or at an intramolecular position in the guide RNA.

[2084] Embodiment 33. The extended guide RNA of embodiment 31, wherein the extended guide RNA is capable of binding to a napDNAbp and directing the napDNAbp to a target DNA sequence.

[2085] Embodiment 34. The extended guide RNA of embodiment 33, wherein the target DNA sequence comprises a target strand and a complementary non-target strand, wherein the guide RNA hybridizes to the target strand to form an RNA-DNA hybrid and an R-loop.

[2086] Embodiment 35. The extended guide RNA of embodiment 31, wherein the at least one RNA extension comprises (i) a reverse transcription template sequence, (ii) a reverse transcription primer binding site, and (iii) optionally a linker sequence.

[2087] Embodiment 36. The extended guide RNA of embodiment 35, wherein the RNA extension is at least 5 nucleotides, at least 6 nucleotides, at least 7 nucleotides, at least 8 nucleotides, at least 9 nucleotides, at least 10 nucleotides, at least 11 nucleotides, at least 12 nucleotides, at least 13 nucleotides, at least 14 nucleotides, at least 15 nucleotides, at least 16 nucleotides, at least 17 nucleotides, at least 18 nucleotides, at least 19 nucleotides, at least 20 nucleotides, at least 21 nucleotides, at least 22 nucleotides, at least 23 nucleotides, at least 24 nucleotides, or at least 25 nucleotides in length.

[2088] Embodiment 37. The extended guide RNA of embodiment 35, wherein the reverse transcription template sequence is at least 3 nucleotides, at least 4 nucleotides, at least 5 nucleotides, at least 6 nucleotides, at least 7 nucleotides, at least 8 nucleotides, at least 9 nucleotides, at least 10 nucleotides, at least 11 nucleotides, at least 12 nucleotides, at least 13 nucleotides, at least 14 nucleotides, or at least 15 nucleotides in length.

[2089] Embodiment 38. The extended guide RNA of embodiment 35, wherein the reverse transcription primer binding site sequence is at least 3 nucleotides, at least 4 nucleotides, at least 5 nucleotides, at least 6 nucleotides, at least 7 nucleotides, at least 8 nucleotides, at least 9 nucleotides, at least 10 nucleotides, at least 11 nucleotides, at least 12 nucleotides, at least 13 nucleotides, at least 14 nucleotides, or at least 15 nucleotides in length.

[2090] Embodiment 39. The extended guide RNA of embodiment 35, wherein the optional linker sequence is at least 3 nucleotides, at least 4 nucleotides, at least 5 nucleotides, at least 6 nucleotides, at least 7 nucleotides, at least 8 nucleotides, at least 9 nucleotides, at least 10 nucleotides, at least 11 nucleotides, at least 12 nucleotides, at least 13 nucleotides, at least 14 nucleotides, or at least 15 nucleotides in length.

[2091] Embodiment 40. The extended guide RNA of embodiment 35, wherein the reverse transcription template sequence encodes a single-strand DNA flap that is complementary to an endogenous DNA sequence adjacent to a nick site, wherein the single-strand DNA flap comprises a desired nucleotide change.

[2092] Embodiment 41. The extended guide RNA of embodiment 40, wherein the single-stranded DNA flap displaces an endogenous single-strand DNA having a 5′ end in the target DNA sequence that has been nicked, and wherein the endogenous single-strand DNA is immediately adjacent downstream of the nick site.

[2093] Embodiment 42. The extended guide RNA of embodiment 41, wherein the endogenous single-stranded DNA having the free 5′ end is excised by the cell.

[2094] Embodiment 43. The extended guide RNA of embodiment 41, wherein cellular repair of the single-strand DNA flap results in installation of the desired nucleotide change, thereby forming a desired product.

[2095] Embodiment 44. The extended guide RNA of embodiment 31, comprising the nucleotide sequence of SEQ ID NOs: 394, 429-442, 641-649, 678-692, 2997-3103, 3113-3121, 3305-3455, 3479-3493, 3522-3556, 3628-3698, and 3755-3810, or a nucleotide sequence having at least 85%, or at least 90%, or at least 95%, or at least 98%, or at least 99% sequence identity with any one of SEQ ID NOs: 394, 429-442, 641-649, 678-692, 2997-3103, 3113-3121, 3305-3455, 3479-3493, 3522-3556, 3628-3698, and 3755-3810.

[2096] Embodiment 45. The extended guide RNA of embodiment 35, wherein the reverse transcription template sequence comprises a nucleotide sequence that is at least 80%, or 85%, or 90%, or 95%, or 99% identical to the endogenous DNA target.

[2097] Embodiment 46. The extended guide RNA of embodiment 35, wherein the reverse transcription primer binding site hybridizes with a free 3′ end of the cut DNA.

[2098] Embodiment 47. The extended guide RNA of embodiment 35, wherein the optional linker sequence is at least 1 nucleotide, or at least 2, at least 3, at least 4, at least 5, at least 6, at least 7, at least 8, at least 9, at least 10, at least 11, at least 12, at least 13, at least 14, or at least 15 nucleotides in length.

[2099] Embodiment 48. A complex comprising comprising a fusion protein of any one of embodiments 1-30 and an extended guide RNA.

[2100] Embodiment 49. The complex of embodiment 48, wherein the extended guide RNA comprises a guide RNA and an RNA extension at the 3′ or 5′ end of the guide RNA or at an intramolecular position in the guide RNA.

[2101] Embodiment 50. The complex of embodiment 48, wherein the extended guide RNA is capable of binding to a napDNAbp and directing the napDNAbp to a target DNA sequence.

[2102] Embodiment 51. The complex of embodiment 50, wherein the target DNA sequence comprises a target strand and a complementary non-target strand, wherein the guide RNA hybridizes to the target strand to form an RNA-DNA hybrid and an R-loop.

[2103] Embodiment 52. The complex of embodiment 49, wherein the at least one RNA extension comprises (i) a reverse transcription template sequence, (ii) a reverse transcription primer binding site, and (iii) optionally a linker sequence.

[2104] Embodiment 53. The complex of embodiment 48, wherein the extended guide RNA comprises the nucleotide sequence of SEQ ID NOs: 394, 429-442, 641-649, 678-692, 2997-3103, 3113-3121, 3305-3455, 3479-3493, 3522-3556, 3628-3698, and 3755-3810, or a nucleotide sequence having at least 85%, or at least 90%, or at least 95%, or at least 98%, or at least 99% sequence identity with any one of SEQ ID NOs: 394, 429-442, 641-649, 678-692, 2997-3103, 3113-3121, 3305-3455, 3479-3493, 3522-3556, 3628-3698, and 3755-3810.

[2105] Embodiment 54. The complex of embodiment 52, wherein the reverse transcription template sequence comprises a nucleotide sequence having at least 80%, or 85%, or 90%, or 95%, or 99% sequence identity with the endogenous DNA target.

[2106] Embodiment 55. The complex of embodiment 52, wherein the reverse transcription primer binding site hybridizes with a free 3′ end of the cut DNA.

[2107] Embodiment 56. A complex comprising comprising a napDNAbp and an extended guide RNA.

[2108] Embodiment 57. The complex of embodiment 56, wherein the napDNAbp is a Cas9 nickase.

[2109] Embodiment 58. The complex of embodiment 56, wherein the napDNAbp comprises an amino acid sequence of SEQ ID NO: 18, or an amino acid sequence having at least 80%, 85%, 90%, 95%, 98%, or 99% sequence identity with SEQ ID NO: 18.

[2110] Embodiment 59. The complex of embodiment 57, wherein the napDNAbp comprises an amino acid sequence having at least 80%, 85%, 90%, 95%, 98%, or 99% sequence identity with the amino acid sequence of any one of SEQ ID NOs: 18-88, 126, 130, 137, 141, 147, 153, 157, 445, 460, 467, and 482-487.

[2111] Embodiment 60. The complex of embodiment 57, wherein the extended guide RNA comprises a guide RNA and an RNA extension at the 3′ or 5′ end of the guide RNA, or at an intramolecular position in the guide RNA.

[2112] Embodiment 61. The complex of embodiment 57, wherein the extended guide RNA is capable of directing the napDNAbp to a target DNA sequence.

[2113] Embodiment 62. The complex of embodiment 61, wherein the target DNA sequence comprises a target strand and a complementary non-target strand, wherein the spacer sequence hybridizes to the target strand to form an RNA-DNA hybrid and an R-loop.

[2114] Embodiment 63. The complex of embodiment 61, wherein the RNA extension comprises (i) a reverse transcription template sequence, (ii) a reverse transcription primer binding site, and (iii) optionally a linker sequence.

[2115] Embodiment 64. The complex of embodiment 57, wherein the extended guide RNA comprises the nucleotide sequence of SEQ ID NOs: 394, 429-442, 641-649, 678-692, 2997-3103, 3113-3121, 3305-3455, 3479-3493, 3522-3556, 3628-3698, and 3755-3810, or a nucleotide sequence having at least 85%, or at least 90%, or at least 95%, or at least 98%, or at least 99% sequence identity with any one of SEQ ID NOs: 394, 429-442, 641-649, 678-692, 2997-3103, 3113-3121, 3305-3455, 3479-3493, 3522-3556, 3628-3698, and 3755-3810.

[2116] Embodiment 65. The complex of embodiment 63, wherein the reverse transcription template sequence comprises a nucleotide sequence that is at least 80%, or 85%, or 90%, or 95%, or 99% identical to the endogenous DNA target.

[2117] Embodiment 66. The complex of embodiment 63, wherein the reverse transcription primer binding site hybridizes with a free 3′ end of the cut DNA.

[2118] Embodiment 67. The complex of embodiment 63, wherein the optional linker sequence is at least 1 nucleotide, or at least 2, at least 3, at least 4, at least 5, at least 6, at least 7, at least 8, at least 9, at least 10, at least 11, at least 12, at least 13, at least 14, or at least 15 nucleotides in length.

[2119] Embodiment 68. A polynucleotide encoding the fusion protein of any of embodiments 1-30.

[2120] Embodiment 69. A vector comprising the polynucleotide of embodiment 68.

[2121] Embodiment 70. A cell comprising the fusion protein of any of embodiments 1-30 and an extended guide RNA bound to the napDNAbp of the fusion protein.

[2122] Embodiment 71. A cell comprising a complex of any one of embodiments 48-67.

[2123] Embodiment 72. A pharmaceutical composition comprising: (i) a fusion protein of any of embodiments 1-30, the complex of embodiments 48-67, the polynucleotide of embodiment 68, or the vector of embodiment 69; and (ii) a pharmaceutically acceptable excipient.

[2124] Embodiment 73. A pharmaceutical composition comprising: (i) the complex of embodiments 48-67 (ii) reverse transcriptase provided in trans; and (iii) a pharmaceutically acceptable excipient.

[2125] Embodiment 74. A kit comprising a nucleic acid construct, comprising: (i) a nuleic acid sequencing encoding the fusion protein of any one of embodiments 1-30; and (ii) a promoter that drives expression of the sequence of (i).

[2126] Embodiment 75. A method for installing a desired nucleotide change in a double-stranded DNA sequence, the method comprising:
[2127] (i) contacting the double-stranded DNA sequence with a complex comprising a fusion protein and an extended guide RNA, wherein the fusion protein comprises a napDNAbp and a reverse transcriptase and wherein the extended guide RNA comprises a reverse transcription template sequence comprising the desired nucleotide change;
[2128] (ii) nicking the double-stranded DNA sequence on the non-target strand, thereby generating a free single-strand DNA having a 3′ end;
[2129] (iii) hybridizing the 3′ end of the free single-strand DNA to the reverse transcription template sequence, thereby priming the reverse transcriptase domain;
[2130] (iv) polymerizing a strand of DNA from the 3′ end, thereby generating a single-strand DNA flap comprising the desired nucleotide change;
[2131] (v) replacing an endogenous DNA strand adjacent the cut site with the single-strand DNA flap, thereby installing the desired nucleotide change in the double-stranded DNA sequence.

[2132] Embodiment 76. The method of embodiment 75, wherein the step of (v) replacing comprises: (i) hybridizing the single-strand DNA flap to the endogenous DNA strand adjacent the cut site to create a sequence mismatch; (ii) excising the endogenous DNA strand; and (iii) repairing the mismatch to form the desired product comprising the desired nucleotide change in both strands of DNA.

[2133] Embodiment 77. The method of embodiment 76, wherein the desired nucleotide change is a single nucleotide substitution, a deletion, or an insertion.

[2134] Embodiment 78. The method of embodiment 77, wherein the single nucleotide substitution is a transition or a transversion.

[2135] Embodiment 79. The method of embodiment 76, wherein the desired nucleotide change is (1) a G to T substitution, (2) a G to A substitution, (3) a G to C substitution, (4) a T to G substitution, (5) a T to A substitution, (6) a T to C substitution, (7) a C to G substitution, (8) a C to T substitution, (9) a C to A substitution, (10) an A to T substitution, (11) an A to G substitution, or (12) an A to C substitution.

[2136] Embodiment 80. The method of embodiment 76, wherein the desired nucleoid change converts (1) a G:C basepair to a T:A basepair, (2) a G:C basepair to an A:T basepair,

[2137] (3) a G:C basepair to C:G basepair, (4) a T:A basepair to a G:C basepair, (5) a T:A basepair to an A:T basepair, (6) a T:A basepair to a C:G basepair, (7) a C:G basepair to a G:C basepair, (8) a C:G basepair to a T:A basepair, (9) a C:G basepair to an A:T basepair, (10) an A:T basepair to a T:A basepair, (11) an A:T basepair to a G:C basepair, or (12) an A:T basepair to a C:G basepair.

[2138] Embodiment 81. The method of embodiment 76, wherein the desired nucleotide change is an insertion or deletion of 1, 2, 3, 4, 5, 6, 7, 8, 9, 10, 11, 12, 13, 14, 15, 16, 17, 18, 19, 20, 21, 22, 23, 24, or 25 nucleotides.

[2139] Embodiment 82. The method of embodiment 76, wherein the desired nucleotide change corrects a disease-associated gene.

[2140] Embodiment 83. The method of embodiment 82, wherein the disease-associated gene is associated with a monogentic disorder selected from the group consisting of: Adenosine Deaminase (ADA) Deficiency; Alpha-1 Antitrypsin Deficiency; Cystic Fibrosis; Duchenne Muscular Dystrophy; Galactosemia; Hemochromatosis; Huntington's Disease; Maple Syrup Urine Disease; Marfan Syndrome; Neurofibromatosis Type 1; Pachyonychia Congenita; Phenylkeotnuria; Severe Combined Immunodeficiency; Sickle Cell Disease; Smith-Lemli-Opitz Syndrome; and Tay-Sachs Disease.

[2141] Embodiment 84. The method of embodiment 82, wherein the disease-associated gene is associated with a polygenic disorder selected from the group consisting of: heart disease; high blood pressure; Alzheimer's disease; arthritis; diabetes; cancer; and obesity.

[2142] Embodiment 85. The method of embodiment 76, wherein the napDNAbp is a nuclease dead Cas9 (dCas9), a Cas9 nickase (nCas9), or a nuclease active Cas9.

[2143] Embodiment 86. The method of embodiment 76, wherein the napDNAbp comprises an amino acid sequence of SEQ ID NO: 18.

[2144] Embodiment 87. The method of embodiment 76, wherein the napDNAbp comprises an amino acid sequence having at least 80%, 85%, 90%, 95%, 98%, or 99% sequence identity with the amino acid sequence of any one of SEQ ID NOs: 18-88, 126, 130, 137, 141, 147, 153, 157, 445, 460, 467, and 482-487.

[2145] Embodiment 88. The method of embodiment 76, wherein the reverse transcriptase comprises any one of the amino acid sequences of SEQ ID NOs: 89-100, 105-122, 128-129, 132, 139, 143, 149, 154, 159, 235, 454, 471, 516, 662, 700, 701-716, 739-741, and 766.

[2146] Embodiment 89. The method of embodiment 76, wherein the reverse transcriptase domain comprises an amino acid sequence having at least 80%, 85%, 90%, 95%, 98%, or 99% sequence identity with the amino acid sequence of any one of SEQ ID NOs: 89-100, 105-122, 128-129, 132, 139, 143, 149, 154, 159, 235, 454, 471, 516, 662, 700, 701-716, 739-741, and 766.

[2147] Embodiment 90. The method of embodiment 76, wherein the extended guide RNA comprises an RNA extension at the 3′ or 5′ ends or at an intramolecular location in the guide RNA, wherein the RNA extension comprises the reverse transcription template sequence.

[2148] Embodiment 91. The method of embodiment 90, wherein the RNA extension is at least 5 nucleotides, at least 6 nucleotides, at least 7 nucleotides, at least 8 nucleotides, at least 9 nucleotides, at least 10 nucleotides, at least 11 nucleotides, at least 12 nucleotides, at least 13 nucleotides, at least 14 nucleotides, at least 15 nucleotides, at least 16 nucleotides, at least 17 nucleotides, at least 18 nucleotides, at least 19 nucleotides, at least 20 nucleotides, at least 21 nucleotides, at least 22 nucleotides, at least 23 nucleotides, at least 24 nucleotides, or at least 25 nucleotides in length.

[2149] Embodiment 92. The method of embodiment 76, wherein the extended guide RNA has a nucleotide sequence selected from the group consisting of SEQ ID NOs: 394, 429-442, 641-649, 678-692, 2997-3103, 3113-3121, 3305-3455, 3479-3493, 3522-3556, 3628-3698, and 3755-3810.

[2150] Embodiment 93. A method for introducing one or more changes in the nucleotide sequence of a DNA molecule at a target locus, comprising:
[2151] (i) contacting the DNA molecule with a nucleic acid programmable DNA binding protein (napDNAbp) and a guide RNA which targets the napDNAbp to the target locus, wherein the guide RNA comprises a reverse transcriptase (RT) template sequence comprising at least one desired nucleotide change;
[2152] (ii) forming an exposed 3′ end in a DNA strand at the target locus;
[2153] (iii) hybridizing the exposed 3′ end to the RT template sequence to prime reverse transcription;
[2154] (iv) synthesizing a single strand DNA flap comprising the at least one desired nucleotide change based on the RT template sequence by reverse transcriptase;
[2155] (v) and incorporating the at least one desired nucleotide change into the corresponding endogenous DNA, thereby introducing one or more changes in the nucleotide sequence of the DNA molecule at the target locus.

[2156] Embodiment 94. The method of embodiment 93, wherein the one or more changes in the nucleotide sequence comprises a transition.

[2157] Embodiment 95. The method of embodiment 94, wherein the transition is selected from the group consisting of: (a) T to C; (b) A to G; (c) C to T; and (d) G to A.

[2158] Embodiment 96. The method of embodiment 93, wherein the one or more changes in the nucleotide sequence comprises a transversion.

[2159] Embodiment 97. The method of embodiment 96, wherein the transversion is selected from the group consisting of: (a) T to A; (b) T to G; (c) C to G; (d) C to A; (e) A to T; (f) A to C; (g) G to C; and (h) G to T.

[2160] Embodiment 98. The method of embodiment 93, wherein the one or more changes in the nucleotide sequence comprises changing (1) a G:C basepair to a T:A basepair, (2) a G:C basepair to an A:T basepair, (3) a G:C basepair to C:G basepair, (4) a T:A basepair to a G:C basepair, (5) a T:A basepair to an A:T basepair, (6) a T:A basepair to a C:G basepair, (7) a C:G basepair to a G:C basepair, (8) a C:G basepair to a T:A basepair, (9) a C:G basepair to an A:T basepair, (10) an A:T basepair to a T:A basepair, (11) an A:T basepair to a G:C basepair, or (12) an A:T basepair to a C:G basepair.

[2161] Embodiment 99. The method of embodiment 93, wherein the one or more changes in the nucleotide sequence comprises an insertion or deletion of 1, 2, 3, 4, 5, 6, 7, 8, 9, 10, 11, 12, 13, 14, 15, 16, 17, 18, 19, 20, 21, 22, 23, 24, or 25 nucleotides.

[2162] Embodiment 100. The method of embodiment 93, wherein the one or more changes in the nucleotide sequence comprises a correction to a disease-associated gene.

[2163] Embodiment 101. The method of embodiment 100, wherein the disease-associated gene is associated with a monogentic disorder selected from the group consisting of: Adenosine Deaminase (ADA) Deficiency; Alpha-1 Antitrypsin Deficiency; Cystic Fibrosis; Duchenne Muscular Dystrophy; Galactosemia; Hemochromatosis; Huntington's Disease; Maple Syrup Urine Disease; Marfan Syndrome; Neurofibromatosis Type 1; Pachyonychia Congenita; Phenylkeotnuria; Severe Combined Immunodeficiency; Sickle Cell Disease; Smith-Lemli-Opitz Syndrome; and Tay-Sachs Disease.

[2164] Embodiment 102. The method of embodiment 100, wherein the disease-associated gene is associated with a polygenic disorder selected from the group consisting of: heart disease; high blood pressure; Alzheimer's disease; arthritis; diabetes; cancer; and obesity.

[2165] Embodiment 103. The method of embodiment 93, wherein the napDNAbp is a nuclease active Cas9 or variant thereof.

[2166] Embodiment 104. The method of embodiment 93, wherein the napDNAbp is a nuclease inactive Cas9 (dCas9) or Cas9 nickase (nCas9), or a variant thereof.

[2167] Embodiment 105. The method of embodiment 93, wherein the napDNAbp comprises an amino acid sequence of SEQ ID NO: 18.

[2168] Embodiment 106. The method of embodiment 93, wherein the napDNAbp comprises an amino acid sequence having at least 80%, 85%, 90%, 95%, 98%, or 99% sequence identity with the amino acid sequence of any one of SEQ ID NOs: 18-88, 126, 130, 137, 141, 147, 153, 157, 445, 460, 467, and 482-487.

[2169] Embodiment 107. The method of embodiment 93, wherein the reverse transcriptase is introduced in trans.

[2170] Embodiment 108. The method of embodiment 93, wherein the napDNAbp comprises a fusion to a reverse transcriptase.

[2171] Embodiment 109. The method of embodiment 93, wherein the reverse transcriptase comprises any one of the amino acid sequences of SEQ ID NOs: 89-100, 105-122, 128-129, 132, 139, 143, 149, 154, 159, 235, 454, 471, 516, 662, 700, 701-716, 739-741, and 766.

[2172] Embodiment 110. The method of embodiment 93, wherein the reverse transcriptase comprises an amino acid sequence having at least 80%, 85%, 90%, 95%, 98%, or 99% sequence identity with the amino acid sequence of any one of SEQ ID NOs: 89-100, 105-122, 128-129, 132, 139, 143, 149, 154, 159, 235, 454, 471, 516, 662, 700, 701-716, 739-741, and 766.

[2173] Embodiment 111. The method of embodiment 93, wherein the step of forming an exposed 3′ end in the DNA strand at the target locus comprises nicking the DNA strand with a nuclease.

[2174] Embodiment 112. The method of embodiment 111, wherein the nuclease is the napDNAbp, is provided as a fusion domain of napDNAbp, or is provided in trans.

[2175] Embodiment 113. The method of embodiment 93, wherein the step of forming an exposed 3′ end in the DNA strand at the target locus comprises contacting the DNA strand with a chemical agent.

[2176] Embodiment 114. The method of embodiment 93, wherein the step of forming an exposed 3′ end in the DNA strand at the target locus comprises introducing a replication error.

[2177] Embodiment 115. The method of embodiment 93, wherein the step of contacting the DNA molecule with the napDNAbp and the guide RNA forms an R-loop.

[2178] Embodiment 116. The method of embodiment 115, wherein the DNA strand in which the exposed 3′ end is formed is in the R-loop.

[2179] Embodiment 117. The method of embodiment 93, wherein guide RNA comprises an extended portion that comprises the reverse transcriptase (RT) template sequence.

[2180] Embodiment 118. The method of embodiment 117, wherein the extended portion is at the 3′ end of the guide RNA, the 5′ end of the guide RNA, or at an intramolecular position in the guide RNA.

[2181] Embodiment 119. The method of embodiment 93, wherein the guide RNA further comprises a primer binding site.

[2182] Embodiment 120. The method of embodiment 93, wherein the guide RNA further comprises a spacer sequence.

[2183] Embodiment 121. The method of embodiment 93, wherein the RT template sequence is homologous to the corresponding endogenous DNA.

[2184] Embodiment 122. A method for introducing one or more changes in the nucleotide sequence of a DNA molecule at a target locus by target-primed reverse transcription, the method comprising: (a) contacting the DNA molecule at the target locus with a (i) fusion protein comprising a nucleic acid programmable DNA binding protein (napDNAbp) and a reverse transcriptase and (ii) a guide RNA comprising an RT template comprising a desired nucleotide change; (b) conducting target-primed reverse transcription of the RT template to generate a single strand DNA comprising the desired nucleotide change; and (c) incorporating the desired nucleotide change into the DNA molecule at the target locus through a DNA repair and/or replication process.

[2185] Embodiment 123. The method of embodiment 122, wherein the RT template is located at the 3′ end of the guide RNA, the 5′ end of the guide RNA, or at an intramolecular location in the guide RNA.

[2186] Embodiment 124. The method of embodiment 122, wherein the desired nucleotide change comprises a transition, a transversion, an insertion, or a deletion, or any combination thereof.

[2187] Embodiment 125. The method of clami 122, wherein the desired nucleotide change comprises a transition selected from the group consisting of: (a) T to C; (b) A to G; (c) C to T; and (d) G to A.

[2188] Embodiment 126. The method of clami 122, wherein the desired nucleotide change comprises a transversion selected from the group consisting of: (a) T to A; (b) T to G; (c) C to G; (d) C to A; (e) A to T; (f) A to C; (g) G to C; and (h) G to T.

[2189] Embodiment 127. The method of embodiment 122, wherein the desired nucleotide change comprises changing (1) a G:C basepair to a T:A basepair, (2) a G:C basepair to an A:T basepair, (3) a G:C basepair to C:G basepair, (4) a T:A basepair to a G:C basepair, (5) a T:A basepair to an A:T basepair, (6) a T:A basepair to a C:G basepair, (7) a C:G basepair to a G:C basepair, (8) a C:G basepair to a T:A basepair, (9) a C:G basepair to an

[2190] A:T basepair, (10) an A:T basepair to a T:A basepair, (11) an A:T basepair to a G:C basepair, or (12) an A:T basepair to a C:G basepair.

[2191] Embodiment 128. A polynucleotide encoding the extended guide RNA of any one of embodiments 31-47.

[2192] Embodiment 129. A vector comprising the polynucleotide of embodiment 128.

[2193] Embodiment 130. A cell comprising the vector of embodiment 129.

[2194] Embodiment 131. The fusion protein of any of embodiments 1-30, wherein the reverse transcriptase is an error-prone reverse transcriptase.

[2195] Embodiment 132. A method for mutagenizing a DNA molecule at a target locus by target-primed reverse transcription, the method comprising: (a) contacting the DNA molecule at the target locus with a (i) fusion protein comprising a nucleic acid programmable DNA binding protein (napDNAbp) and an error-prone reverse transcriptase and (ii) a guide RNA comprising an RT template comprising a desired nucleotide change; (b) conducting target-primed reverse transcription of the RT template to generate a mutagenized single strand DNA; and (c) incorporating the mutagenized single strand DNA into the DNA molecule at the target locus through a DNA repair and/or replication process.

[2196] Embodiment 133. The method of embodiment 132, wherein the fusion protein comprises the amino acid sequence of PE1, PE2, or PE3.

[2197] Embodiment 134. The method of embodiment 132, wherein the napDNAbp is a Cas9 nickase (nCas9).

[2198] Embodiment 135. The method of embodiment 132, wherein the napDNAbp comprises the amino acid sequence of SEQ ID NOs: 18-88, 126, 130, 137, 141, 147, 153, 157, 445, 460, 467, and 482-487.

[2199] Embodiment 136. The method of embodiment 132, wherein the guide RNA comprises SEQ ID NO: 222.

[2200] Embodiment 137. The method of embodiment 132, wherein the step of (b) conducting target-primed reverse transcription comprises generating a 3′ end primer binding sequence at the target locus that is capable of priming reverse transcription by annealing to a primer binding site on the guide RNA.

[2201] Embodiment 138. A method for replacing a trinucleotide repeat expansion mutation in a target DNA molecule with a healthy sequence comprising a healthy number of repeat trinucleotides, the method comprising: (a) contacting the DNA molecule at the target locus with a (i) fusion protein comprising a nucleic acid programmable DNA binding protein (napDNAbp) and a reverse transcriptase and (ii) a guide RNA comprising an RT template comprising the replacement sequence, wherein said fusion protein intr; (b) conducting target-primed reverse transcription of the RT template to generate a single strand DNA comprising the replacement sequence; and (c) incorporating the single strand DNA into the DNA molecule at the target locus through a DNA repair and/or replication process.

[2202] Embodiment 139. The method of embodiment 138, wherein the fusion protein comprises the amino acid sequence of PE1, PE2, or PE3.

[2203] Embodiment 140. The method of embodiment 138, wherein the napDNAbp is a Cas9 nickase (nCas9).

[2204] Embodiment 141. The method of embodiment 138, wherein the napDNAbp comprises the amino acid sequence of SEQ ID NOs: 18-88, 126, 130, 137, 141, 147, 153, 157, 445, 460, 467, and 482-487.

[2205] Embodiment 142. The method of embodiment 138, wherein the guide RNA comprises SEQ ID NO: 222.

[2206] Embodiment 143. The method of embodiment 138, wherein the step of (b) conducting target-primed reverse transcription comprises generating a 3′ end primer binding sequence at the target locus that is capable of priming reverse transcription by annealing to a primer binding site on the guide RNA.

[2207] Embodiment 144. The method of embodiment 138, wherein the trinucleotide repeat expansion mutation is associated with Huntington's Disease, Fragile X syndrome, or Friedreich's ataxia.

[2208] Embodiment 145. The method of embodiment 138, wherein the trinucleotide repeat expansion mutation comprises a repeating unit of CAG triplets.

[2209] Embodiment 146. The method of embodiment 138, wherein the trinucleotide repeat expansion mutation comprises a repeating unit of GAA triplets.

[2210] Embodiment 147. A method of installing a functional moiety in a protein of interest encoded by a target nucleotide sequence by prime editing, the method comprising: (a) contacting the target nucleotide sequence with a (i) prime editor comprising a nucleic acid programmable DNA binding protein (napDNAbp) and a reverse transcriptase and (ii) a PEgRNA comprising an edit template encoding the functional moiety; (b) polymerizing a single strand DNA sequence encoding the functional moiety; and (c) incorporating the single strand DNA sequence in place of a corresponding endogenous strand at the target nucleotide sequence through a DNA repair and/or replication process, wherein the method produces a recombinant target nucleotide sequence that encodes a fusion protein comprising the protein of interest and the functional moiety.

[2211] Embodiment 148. The method of embodiment 147, wherein functional moiety is peptide tag.

[2212] Embodiment 149. The method of embodiment 148, wherein the peptide tag is an affinity tag, solubilization tag, chromatography tag, epitope tag, or a fluorescence tag.

[2213] Embodiment 150. The method of embodiment 148, wherein the peptide tag is selected from the group consisting of: AviTag (SEQ ID NO: 245); C-tag (SEQ ID NO: 246); Calmodulin-tag (SEQ ID NO: 247); polyglutamate tag (SEQ ID NO: 248); E-tag (SEQ ID NO: 249); FLAG-tag (SEQ ID NO: 2); HA-tag (SEQ ID NO: 5); His-tag (SEQ ID NOs: 252-262); Myc-tag (SEQ ID NO: 6); NE-tag (SEQ ID NO: 264); Rho1D4-tag (SEQ ID NO: 265); S-tag (SEQ ID NO: 266); SBP-tag (SEQ ID NO: 267); Softag-1 (SEQ ID NO: 268); Softag-2 (SEQ ID NO: 269); Spot-tag (SEQ ID NO: 270); Strep-tag (SEQ ID NO: 271); TC tag (SEQ ID NO: 272); Ty tag (SEQ ID NO: 273); V5 tag (SEQ ID NO: 3); VSV-tag (SEQ ID NO: 275); and Xpress tag (SEQ ID NO: 276).

[2214] Embodiment 151. The method of embodiment 148, wherein the peptide tag is selected from the group consisting of: AU1 epitope (SEQ ID NO: 278); AU5 epitope (SEQ ID NO: 279); Bacteriophage T7 epitope (T7-tag) (SEQ ID NO: 280); Bluetongue virus tag (B-tag) (SEQ ID NO: 281); E2 epitope (SEQ ID NO: 282); Histidine affinity tag (HAT) (SEQ ID NO: 283); HSV epitope (SEQ ID NO: 284); Polyarginine (Arg-tag) (SEQ ID NO: 285); Polyaspartate (Asp-tag) (SEQ ID NO: 286); Polyphenylalanine (Phe-tag) (SEQ ID NO: 287); S1-tag (SEQ ID NO: 288); S-tag (SEQ ID NO: 266); and VSV-G (SEQ ID NO: 275).

[2215] Embodiment 152. The method of embodiment 147, wherein the functional moiety is an immunoepitope.

[2216] Embodiment 153. The method of embodiment 152, wherein the immunoepitope is selected from the group consisting of: tetanus toxoid (SEQ ID NO: 396); diphtheria toxin mutant CRM197 (SEQ ID NO: 398); mumps immunoepitope 1 (SEQ ID NO: 400); mumps immunoepitope 2 (SEQ ID NO: 402); mumps immunoeptitope 3 (SEQ ID NO: 404); rubella virus (SEQ ID NO: 406); hemagglutinin (SEQ ID NO: 408); neuraminidase (SEQ ID NO: 410); TAP1 (SEQ ID NO: 412); TAP2 (SEQ ID NO: 414); hemagglutinin epitopes toward class I HLA (SEQ ID NO: 416); neuraminidase epitopes toward class I HLA (SEQ ID NO: 418); hemagglutinin epitopes toward class II HLA (SEQ ID NO: 420); neuraminidase epitopes toward class II HLA (SEQ ID NO: 422); hemagglutinin epitope H5N1-bound class I and class II HLA (SEQ ID NO: 424); neuraminidase epitope H5N1-bound class I and class II HLA (SEQ ID NO: 426).

[2217] Embodiment 154. The method of embodiment 147, wherein the functional moiety alters the localization of the protein of interest.

[2218] Embodiment 155. The method of embodiment 147, wherein the functional moiety is a degradation tag such that the degradation rate of the protein of interest is altered.

[2219] Embodiment 156. The method of embodiment 155, wherein the degradation tag comprises an amino acid sequence encoding the degradation tags as disclosed herein.

[2220] Embodiment 157. The method of embodiment 147, wherein the functional moiety is a small molecule binding domain.

[2221] Embodiment 158. The method of embodiment 157, wherein the small molecule binding domain is FKBP12 of SEQ ID NO: 488.

[2222] Embodiment 159. The method of embodiment 157, wherein the small molecule binding domain is FKBP12-F36V of SEQ ID NO: 489.

[2223] Embodiment 160. The method of embodiment 157, wherein the small molecule binding domain is cyclophilin of SEQ ID NOs: 490 and 493-494.

[2224] Embodiment 161. The method of embodiment 157, wherein the small molecule binding domain is installed in two or more proteins of interest.

[2225] Embodiment 162. The method of embodiment 161, wherein the two or more proteins of interest may dimerize upon contacting with a small molecule.

[2226] Embodiment 163. The method of embodiment 157, wherein the small molecule is a dimer of a small molecule selected from the group consisting of those compounds disclosed in Embodiment 163 of Group 1.

[2227] Embodiment 164. A method of installing an immunoepitope in a protein of interest encoded by a target nucleotide sequence by prime editing, the method comprising: (a) contacting the target nucleotide sequence with a (i) prime editor comprising a nucleic acid programmable DNA binding protein (napDNAbp) and a reverse transcriptase and (ii) a PEgRNA comprising an edit template encoding the functional moiety; (b) polymerizing a single strand DNA sequence encoding the immunoepitope; and (c) incorporating the single strand DNA sequence in place of a corresponding endogenous strand at the target nucleotide sequence through a DNA repair and/or replication process, wherein the method produces a recombinant target nucleotide sequence that encodes a fusion protein comprising the protein of interest and the immunoepitope.

[2228] Embodiment 165. The method of embodiment 164, wherein the immunoepitope is selected from the group consisting of: tetanus toxoid (SEQ ID NO: 396); diphtheria toxin mutant CRM197 (SEQ ID NO: 630); mumps immunoepitope 1 (SEQ ID NO: 400); mumps immunoepitope 2 (SEQ ID NO: 402); mumps immunoeptitope 3 (SEQ ID NO: 404); rubella virus (SEQ ID NO: 406); hemagglutinin (SEQ ID NO: 408); neuraminidase (SEQ ID NO: 410); TAP1 (SEQ ID NO: 412); TAP2 (SEQ ID NO: 414); hemagglutinin epitopes toward class I HLA (SEQ ID NO: 416); neuraminidase epitopes toward class I HLA (SEQ ID NO: 418); hemagglutinin epitopes toward class II HLA (SEQ ID NO: 420); neuraminidase epitopes toward class II HLA (SEQ ID NO: 422); hemagglutinin epitope H5N1-bound class I and class II HLA (SEQ ID NO: 424); neuraminidase epitope H5N1-bound class I and class II HLA (SEQ ID NO: 426).

[2229] Embodiment 166. The method of embodiment 164, wherein the fusion protein comprises the amino acid sequence of PE1, PE2, or PE3.

[2230] Embodiment 167. The method of embodiment 164, wherein the napDNAbp is a Cas9 nickase (nCas9).

[2231] Embodiment 168. The method of embodiment 164, wherein the napDNAbp comprises the amino acid sequence of SEQ ID NOs: 18-88, 126, 130, 137, 141, 147, 153, 157, 445, 460, 467, and 482-487.

[2232] Embodiment 169. The method of embodiment 164, wherein the guide RNA comprises SEQ ID NO: 222.

[2233] Embodiment 170. A method of installing a small molecule dimerization domain in a protein of interest encoded by a target nucleotide sequence by prime editing, the method comprising: (a) contacting the target nucleotide sequence with a (i) prime editor comprising a nucleic acid programmable DNA binding protein (napDNAbp) and a reverse transcriptase and (ii) a PEgRNA comprising an edit template encoding the small molecule dimerization domain; (b) polymerizing a single strand DNA sequence encoding the immunoepitope; and (c) incorporating the single strand DNA sequence in place of a corresponding endogenous strand at the target nucleotide sequence through a DNA repair and/or replication process, wherein the method produces a recombinant target nucleotide sequence that encodes a fusion protein comprising the protein of interest and the small molecule dimerization domain.

[2234] Embodiment 171. The method of embodiment 170, further comprising conducting the method on a second protein of interest.

[2235] Embodiment 172. The method of embodiment 171, wherein the first protein of interest and the second protein of interest dimerize in the presence of a small molecule that binds to the dimerization domain on each of said proteins.

[2236] Embodiment 173. The method of embodiment 170, wherein the small molecule binding domain is FKBP12 of SEQ ID NO: 488.

[2237] Embodiment 174. The method of embodiment 170, wherein the small molecule binding domain is FKBP12-F36V of SEQ ID NO: 489.

[2238] Embodiment 175. The method of embodiment 170, wherein the small molecule binding domain is cyclophilin of SEQ ID NOs: 490 and 493-494.

[2239] Embodiment 176. The method of embodiment 170, wherein the small molecule is a dimer of a small molecule selected from the group consisting of those compounds disclosed in Embodiment 163 of Group 1.

[2240] Embodiment 177. The method of embodiment 170, wherein the fusion protein comprises the amino acid sequence of PE1, PE2, or PE3.

[2241] Embodiment 178. The method of embodiment 170, wherein the napDNAbp is a Cas9 nickase (nCas9).

[2242] Embodiment 179. The method of embodiment 170, wherein the napDNAbp comprises the amino acid sequence of SEQ ID NOs: 18-88, 126, 130, 137, 141, 147, 153, 157, 445, 460, 467, and 482-487.

[2243] Embodiment 180. The method of embodiment 170, wherein the guide RNA comprises SEQ ID NO: 222.

[2244] Embodiment 181. A method of installing a peptide tag or epitope onto a protein using prime editing, comprising: contacting a target nucleotide sequence encoding the protein with a prime editor construct configured to insert therein a second nucleotide sequence encoding the peptide tag to result in a recombinant nucleotide sequence, such that the peptide tag and the protein are expressed from the recombinant nucleotide sequence as a fusion protein.

[2245] Embodiment 182. The method of embodiment 181, wherein the peptide tag is used for purification and/or detection of the protein.

[2246] Embodiment 183. The method of embodiment 181, wherein the peptide tag is a poly-histidine (e.g., HHHHHH) (SEQ ID NOs: 252-262), FLAG (e.g., DYKDDDDK) (SEQ ID NO: 2), V5 (e.g., GKPIPNPLLGLDST) (SEQ ID NO: 3), GCN4, HA (e.g., YPYDVPDYA) (SEQ ID NO: 5), Myc (e.g. EQKLISEED) (SEQ ID NO: 6), GST . . . etc.

[2247] Embodiment 184. The method of embodiment 181, wherein the peptide tag has an amino acid sequence selected from the group consisting of SEQ ID NO: 1-6, 245-249, 252-262, 264-273, 275-276, 281, 278-288, and 622.

[2248] Embodiment 185. The method of embodiment 181, wherein the peptide tag is fused to the protein by a linker.

[2249] Embodiment 186. The method of embodiment 181, wherein the fusion protein has the following structure: [protein]-[peptide tag] or [peptide tag]-[protein], wherein “]-[” represents an optional linker.

[2250] Embodiment 187. The method of embodiment 181, wherein the linker has an amino acid sequence of SEQ ID NO: 127, 165-176, 446, 453, and 767-769.

[2251] Embodiment 188. The method of embodiment 181, wherein the prime editor construct comprises a PEgRNA comprising the nucleotide sequence of SEQ ID NOs: 101-104, 181-183, 223-244, 277, 325-334, 336, 338, 340, 342, 344, 346, 348, 350, 352, 354, 356, 358, 360, 362, 364, 366, 368, 499-505, 735-761, 776-777.

[2252] Embodiment 189. The method of embodiment 181, wherein the PEgRNA comprises a spacer, a gRNA core, and an extension arm, wherein the spacer is complementary to the target nucleotide sequence and the extension arm comprises a reverse transcriptase template that encodes the peptide tag.

[2253] Embodiment 190. The method of embodiment 181, wherein the PEgRNA comprises a spacer, a gRNA core, and an extension arm, wherein the spacer is complementary to the target nucleotide sequence and the extension arm comprises a reverse transcriptase template that encodes the peptide tag.

[2254] Embodiment 191. A method of preventing or halting the progression of a prion disease by installing on or more protective mutations into PRNP encoded by a target nucleotide sequence by prime editing, the method comprising: (a) contacting the target nucleotide sequence with a (i) prime editor comprising a nucleic acid programmable DNA binding protein (napDNAbp) and a reverse transcriptase and (ii) a PEgRNA comprising an edit template encoding the functional moiety; (b) polymerizing a single strand DNA sequence encoding the protective mutation; and (c) incorporating the single strand DNA sequence in place of a corresponding endogenous strand at the target nucleotide sequence through a DNA repair and/or replication process, wherein the method produces a recombinant target nucleotide sequence that encodes a PRNP comprising a protective mutation and which is resistant to misfolding.

[2255] Embodiment 192. The method of embodiment 191, wherein the prion disease is a human prion disease.

[2256] Embodiment 193. The method of embodiment 191, wherein the prion disease is an animal prion disease.

[2257] Embodiment 194. The method of embodiment 192, wherein the prion disease is Creutzfeldt-Jakob Disease (CJD), Variant Creutzfeldt-Jakob Disease (νCJD), Gerstmann-Straus sler-Scheinker Syndrome, Fatal Familial Insomnia, or Kuru.

[2258] Embodiment 195. The method of embodiment 193, wherein the prion disease is Bovine Spongiform Encephalopathy (BSE or “mad cow disease”), Chronic Wasting Disease (CWD), Scrapie, Transmissible Mink Encephalopathy, Feline Spongiform Encephalopathy, and Ungulate Spongiform Encephalopathy.

[2259] Embodiment 196. The method of embodiment 191, wherein the wildtype PRNP amino acid sequence is SEQ ID NOs: 291-292.

[2260] Embodiment 197. The method of embodiment 191, wherein the method results in a modified PRNP amino acid sequence selected from the group consisting of SEQ ID NOs: 293-309, and 311-323, wherein said modified PRNP protein is resistant to misfolding.

[2261] Embodiment 198. The method of embodiment 191, wherein the fusion protein comprises the amino acid sequence of PE1, PE2, or PE3.

[2262] Embodiment 199. The method of embodiment 191, wherein the napDNAbp is a Cas9 nickase (nCas9).

[2263] Embodiment 200. The method of embodiment 191, wherein the napDNAbp comprises the amino acid sequence of SEQ ID NOs: 18-88, 126, 130, 137, 141, 147, 153, 157, 445, 460, 467, and 482-487.

[2264] Embodiment 201. The method of embodiment 191, wherein the guide RNA comprises SEQ ID NO: 222.

[2265] Embodiment 202. A method of installing a ribonucleotide motif or tag in an RNA of interest encoded by a target nucleotide sequence by prime editing, the method comprising: (a) contacting the target nucleotide sequence with a (i) prime editor comprising a nucleic acid programmable DNA binding protein (napDNAbp) and a reverse transcriptase and (ii) a PEgRNA comprising an edit template encoding the ribonucleotide motif or tag; (b) polymerizing a single strand DNA sequence encoding the ribonucleotide motif or tag; and (c) incorporating the single strand DNA sequence in place of a corresponding endogenous strand at the target nucleotide sequence through a DNA repair and/or replication process, wherein the method produces a recombinant target nucleotide sequence that encodes a modified RNA of interest comprising the ribonucleotide motif or tag.

[2266] Embodiment 203. The method of embodiment 202, wherein ribonucleotide motif or tag is a detection moiety.

[2267] Embodiment 204. The method of embodiment 202, wherein the ribonucleotide motif or tag affects the expression level of the RNA of interest.

[2268] Embodiment 205. The method of embodiment 202, wherein the ribonucleotide motif or tag affects the transport or subcellular location of the RNA of interest.

[2269] Embodiment 206. The method of embodiment 202, wherein the ribonucleotide motif or tag is selected from the group consisting of SV40 type 1, SV40 type 2, SV40 type 3, hGH, BGH, rbGlob, TK, MALAT1 ENE-mascRNA, KSHV PAN ENE, Smbox/U1 snRNA box, U1 snRNA 3′ box, tRNA-lysine, broccoli aptamer, spinach aptamer, mango aptamer, HDV ribozyme, and m6A.

[2270] Embodiment 207. The method of embodiment 202, wherein the PEgRNA comprises SEQ ID NOs: 101-104, 181-183, 223-244, 277, 325-334, 336, 338, 340, 342, 344, 346, 348, 350, 352, 354, 356, 358, 360, 362, 364, 366, 368, 499-505, 735-761, 776-777.

[2271] Embodiment 208. The method of embodiment 202, wherein the fusion protein comprises the amino acid sequence of PE1, PE2, or PE3.

[2272] Embodiment 209. The method of embodiment 202, wherein the napDNAbp is a Cas9 nickase (nCas9).

[2273] Embodiment 210. The method of embodiment 202, wherein the napDNAbp comprises the amino acid sequence of SEQ ID NOs: 18-88, 126, 130, 137, 141, 147, 153, 157, 445, 460, 467, and 482-487.

[2274] Embodiment 211. A method of installing or deleting a functional moiety in a protein of interest encoded by a target nucleotide sequence by prime editing, the method comprising: (a) contacting the target nucleotide sequence with a (i) prime editor comprising a nucleic acid programmable DNA binding protein (napDNAbp) and a reverse transcriptase and (ii) a PEgRNA comprising an edit template encoding the functional moiety or deletion of same; (b) polymerizing a single strand DNA sequence encoding the functional moiety or deletion of same; and (c) incorporating the single strand DNA sequence in place of a corresponding endogenous strand at the target nucleotide sequence through a DNA repair and/or replication process, wherein the method produces a recombinant target nucleotide sequence that encodes a modified protein comprising the protein of interest and the functional moiety or the removal of same, wherein the functional moiety alters a modification state or localization state of the protein.

[2275] Embodiment 212. The method of embodiment 211, wherein functional moiety alters the phosphorylation, ubiquitylation, glycosylation, lipidation, hydroxylation, methylation, acetylation, crotonylation, SUMOylation state of the protein of interest.

[2276] Embodiment 213. A fusion protein comprising a nucleic acid programmable DNA binding protein (napDNAbp) and a polymerase.

[2277] Embodiment 214. The fusion protein of embodiment 213, wherein the fusion protein is capable of carrying out prime editing in the presence of an prime editing guide RNA (PEgRNA).

[2278] Embodiment 215. The fusion protein of embodiment 213, wherein the napDNAbp has a nickase activity.

[2279] Embodiment 216. The fusion protein of embodiment 213, wherein the napDNAbp is a Cas9 protein or variant thereof.

[2280] Embodiment 217. The fusion protein of embodiment 213, wherein the napDNAbp is a nuclease active Cas9, a nuclease inactive Cas9 (dCas9), or a Cas9 nickase (nCas9).

[2281] Embodiment 218. The fusion protein of embodiment 213, wherein the napDNAbp is Cas9 nickase (nCas9).

[2282] Embodiment 219. The fusion protein of embodiment 213, wherein the napDNAbp is selected from the group consisting of: Cas9, Cas12e, Cas12d, Cas12a, Cas12b1, Cas13a, Cas12c, and Argonaute and optionally has a nickase activity.

[2283] Embodiment 220. The fusion protein of embodiment 213, wherein the fusion protein when complexed with a PEgRNA is capable of binding to a target DNA sequence.

[2284] Embodiment 221. The fusion protein of embodiment 220, wherein the target DNA sequence comprises a target strand and a complementary non-target strand.

[2285] Embodiment 222. The fusion protein of embodiment 220, wherein the binding of the fusion protein complexed to the PEgRNA forms an R-loop.

[2286] Embodiment 223. The fusion protein of embodiment 222, wherein the R-loop comprises (i) an RNA-DNA hybrid comprising the PEgRNA and the target strand, and (ii) the complementary non-target strand.

[2287] Embodiment 224. The fusion protein of embodiment 223, wherein the complementary non-target strand is nicked to form a priming sequence having a free 3′ end.

[2288] Embodiment 225. The fusion protein of embodiment 214, wherein the PEgRNA comprises (a) a guide RNA and (b) an extension arm at the 5′ or the 3′ end of the guide RNA, or at an intramolecular location in the guide RNA.

[2289] Embodiment 226. The fusion protein of embodiment 225, wherein the extension arm comprises (i) a DNA synthesis template sequence comprising a desired nucleotide change, and (ii) a primer binding site.

[2290] Embodiment 227. The fusion protein of embodiment 226, wherein the DNA synthesis template sequence encodes a single-strand DNA flap that is complementary to an endogenous DNA sequence adjacent to the nick site, wherein the single-strand DNA flap comprises the desired nucleotide change.

[2291] Embodiment 228. The fusion protein of embodiment 225, wherein the extension arm is at least 5 nucleotides, at least 6 nucleotides, at least 7 nucleotides, at least 8 nucleotides, at least 9 nucleotides, at least 10 nucleotides, at least 11 nucleotides, at least 12 nucleotides, at least 13 nucleotides, at least 14 nucleotides, at least 15 nucleotides, at least 16 nucleotides, at least 17 nucleotides, at least 18 nucleotides, at least 19 nucleotides, at least 20 nucleotides, at least 21 nucleotides, at least 22 nucleotides, at least 23 nucleotides, at least 24 nucleotides, or at least 25 nucleotides in length.

[2292] Embodiment 229. The fusion protein of embodiment 227, wherein the single-strand DNA flap hybridizes to the endogenous DNA sequence adjacent to the nick site, thereby installing the desired nucleotide change.

[2293] Embodiment 230. The fusion protein of embodiment 227, wherein the single-stranded DNA flap displaces the endogenous DNA sequence adjacent to the nick site and which has a free 5′ end.

[2294] Embodiment 231. The fusion protein of embodiment 230, wherein the endogenous DNA sequence having the 5′ end is excised by the cell.

[2295] Embodiment 232. The fusion protein of embodiment 230, wherein cellular repair of the single-strand DNA flap results in installation of the desired nucleotide change, thereby forming a desired product.

[2296] Embodiment 233. The fusion protein of embodiment 226, wherein the desired nucleotide change is installed in an editing window that is between about −4 to +10 of the PAM sequence, or between about −10 to +20 of the PAM sequence, or between about −20 to +40 of the PAM sequence, or between about −30 to +100 of the PAM sequence, or wherein the desired nucleotide change is installed at least 1, 2, 3, 4, 5, 6, 7, 8, 9, 10, 11, 12, 13, 14, 15, 16, 17, 18, 19, 20, 21, 22, 23, 24, 25, 26, 27, 28, 29, 30, 31, 32, 33, 34, 35, 36, 37, 38, 39, 40, 41, 42, 43, 44, 45, 46, 47, 48, 49, 50, 51, 52, 53, 54, 55, 56, 57, 58, 59, 60, 61, 62, 63, 64, 65, 66, 67, 68, 69, 70, 71, 72, 73, 74, 75, 76, 77, 78, 79, 80, 81, 82, 83, 84, 85, 86, 87, 88, 89, 90, 91, 92, 93, 94, 95, 96, 97, 98, 99, or 100 nucleotides downstream of the nick site.

[2297] Embodiment 234. The fusion protein of embodiment 213, wherein the napDNAbp comprises an amino acid sequence of SEQ ID NO: 18, or an amino acid sequence having at least 80%, 85%, 90%, 95%, 98%, or 99% sequence identity with the amino acid sequence to SEQ ID NO: 18.

[2298] Embodiment 235. The fusion protein of embodiment 213, wherein the napDNAbp comprises an amino acid sequence having at least 80%, 85%, 90%, 95%, 98%, or 99% sequence identity with the amino acid sequence of any one of SEQ ID NOs: 18-88, 126, 130, 137, 141, 147, 153, 157, 445, 460, 467, and 482-487.

[2299] Embodiment 236. The fusion protein of embodiment 213, wherein the polymerase is a reverse transcriptase comprising any one of the amino acid sequences of SEQ ID NOs: 89-100, 105-122, 128-129, 132, 139, 143, 149, 154, 159, 235, 454, 471, 516, 662, 700, 701-716, 739-741, and 766.

[2300] Embodiment 237. The fusion protein of embodiment 213, wherein the polymerase is a reverse transcriptase comprising an amino acid sequence having at least 80%, 85%, 90%, 95%, 98%, or 99% sequence identity with the amino acid sequence of any one of SEQ ID NOs: 89-100, 105-122, 128-129, 132, 139, 143, 149, 154, 159, 235, 454, 471, 516, 662, 700, 701-716, 739-741, and 766.

[2301] Embodiment 238. The fusion protein of embodiment 213, wherein the polymerase is a naturally-occurring reverse transcriptase from a retrovirus or a retrotransposon.

[2302] Embodiment 239. The fusion protein of any one of the previous embodiments, wherein the fusion protein comprises the structure NH₂-[napDNAbp]-[polymerase]-COOH; or NH₂-[polymerase]-[napDNAbp]-COOH, wherein each instance of “]-[” indicates the presence of an optional linker sequence.

[2303] Embodiment 240. The fusion protein of embodiment 239, wherein the linker sequence comprises an amino acid sequence of SEQ ID NOs: 127, 165-176, 446, 453, and 767-769.

[2304] Embodiment 241. The fusion protein of embodiment 226, wherein the desired nucleotide change is a single nucleotide change, an insertion of one or more nucleotides, or a deletion of one or more nucleotides.

[2305] Embodiment 242. The fusion protein of embodiment 241, wherein the insert or deletion is at least 1, at least 2, at least 3, at least 4, at least 5, at least 6, at least 7, at least 8, at least 9, at least 10, at least 11, at least 12, at least 13, at least 14, at least 15, at least 16, at least 17, at least 18, at least 19, at least 20, at least 21, at least 22, at least 23, at least 24, at least 25, at least 26, at least 27, at least 28, at least 29, at least 30, at least 31, at least 32, at least 33, at least 34, at least 35, at least 36, at least 37, at least 38, at least 39, at least 40, at least 41, at least 42, at least 43, at least 44, at least 45, at least 46, at least 47, at least 48, at least 49, or at least 50.

[2306] Embodiment 243. A PEgRNA comprising a guide RNA and at least one nucleic acid extension arm comprising a DNA synthesis template.

[2307] Embodiment 244. The PEgRNA of embodiment 241, wherein the nucleic acid extension arm is position at the 3′ or 5′ end of the guide RNA, or at an intramolecular position in the guide RNA, and wherein the nucleic acid extension arm is DNA or RNA.

[2308] Embodiment 245. The PEgRNA of embodiment 242, wherein the PEgRNA is capable of binding to a napDNAbp and directing the napDNAbp to a target DNA sequence.

[2309] Embodiment 246. The PEgRNA of embodiment 245, wherein the target DNA sequence comprises a target strand and a complementary non-target strand, wherein the guide RNA hybridizes to the target strand to form an RNA-DNA hybrid and an R-loop.

[2310] Embodiment 247. The PEgRNA of embodiment 243, wherein the at least one nucleic acid extension arm comprises (i) a DNA synthesis template, and (ii) a primer binding site.

[2311] Embodiment 248. The PEgRNA of embodiment 247, wherein the nucleic acid extension arm is at least 5 nucleotides, at least 6 nucleotides, at least 7 nucleotides, at least 8 nucleotides, at least 9 nucleotides, at least 10 nucleotides, at least 11 nucleotides, at least 12 nucleotides, at least 13 nucleotides, at least 14 nucleotides, at least 15 nucleotides, at least 16 nucleotides, at least 17 nucleotides, at least 18 nucleotides, at least 19 nucleotides, at least 20 nucleotides, at least 21 nucleotides, at least 22 nucleotides, at least 23 nucleotides, at least 24 nucleotides, or at least 25 nucleotides in length.

[2312] Embodiment 249. The PEgRNA of embodiment 247, wherein the DNA synthesis template is at least 3 nucleotides, at least 4 nucleotides, at least 5 nucleotides, at least 6 nucleotides, at least 7 nucleotides, at least 8 nucleotides, at least 9 nucleotides, at least 10 nucleotides, at least 11 nucleotides, at least 12 nucleotides, at least 13 nucleotides, at least 14 nucleotides, or at least 15 nucleotides in length.

[2313] Embodiment 250. The PEgRNA of embodiment 247, wherein the primer binding site is at least 3 nucleotides, at least 4 nucleotides, at least 5 nucleotides, at least 6 nucleotides, at least 7 nucleotides, at least 8 nucleotides, at least 9 nucleotides, at least 10 nucleotides, at least 11 nucleotides, at least 12 nucleotides, at least 13 nucleotides, at least 14 nucleotides, or at least 15 nucleotides in length.

[2314] Embodiment 251. The PEgRNA of embodiment 243, further comprising at least one additional structure selected from the group consisting of a linker, a stem loop, a hairpin, a toeloop, an aptamer, or an RNA-protein recruitment domain.

[2315] Embodiment 252. The PEgRNA of embodiment 247, wherein the DNA synthesis template encodes a single-strand DNA flap that is complementary to an endogenous DNA sequence adjacent to a nick site, wherein the single-strand DNA flap comprises a desired nucleotide change.

[2316] Embodiment 253. The PEgRNA of embodiment 252, wherein the single-stranded DNA flap displaces an endogenous single-strand DNA having a 5′ end in the target DNA sequence that has been nicked, and wherein the endogenous single-strand DNA is immediately adjacent downstream of the nick site.

[2317] Embodiment 254. The PEgRNA of embodiment 253, wherein the endogenous single-stranded DNA having the free 5′ end is excised by the cell.

[2318] Embodiment 255. The PEgRNA of embodiment 253, wherein cellular repair of the single-strand DNA flap results in installation of the desired nucleotide change, thereby forming a desired product.

[2319] Embodiment 256. The PEgRNA of embodiment 243, comprising the nucleotide sequence of SEQ ID NOs: 101-104, 181-183, 223-244, 277, 325-334, 336, 338, 340, 342, 344, 346, 348, 350, 352, 354, 356, 358, 360, 362, 364, 366, 368, 499-505, 735-761, 776-777, or a nucleotide sequence having at least 85%, or at least 90%, or at least 95%, or at least 98%, or at least 99% sequence identity with any one of SEQ ID NOs: 101-104, 181-183, 223-244, 277, 325-334, 336, 338, 340, 342, 344, 346, 348, 350, 352, 354, 356, 358, 360, 362, 364, 366, 368, 499-505, 735-761, 776-777.

[2320] Embodiment 257. The PEgRNA of embodiment 247, wherein the DNA synthesis template comprises a nucleotide sequence that is at least 80%, or 85%, or 90%, or 95%, or 99% identical to the endogenous DNA target.

[2321] Embodiment 258. The PEgRNA of embodiment 247, wherein the primer binding site hybridizes with a free 3′ end of the cut DNA.

[2322] Embodiment 259. The PEgRNA of embodiment 251, wherein the at least one additional structure is located at the 3′ or 5′ end of the PEgRNA.

[2323] Embodiment 260. A complex comprising comprising a fusion protein of any one of embodiments 213-242 and an PEgRNA.

[2324] Embodiment 261. The complex of embodiment 260, wherein the PEgRNA comprises a guide RNA and an nucleic acid extension arm at the 3′ or 5′ end of the guide RNA or at an intramolecular position in the guide RNA.

[2325] Embodiment 262. The complex of embodiment 260, wherein the PEgRNA is capable of binding to a napDNAbp and directing the napDNAbp to a target DNA sequence.

[2326] Embodiment 263. The complex of embodiment 262, wherein the target DNA sequence comprises a target strand and a complementary non-target strand, wherein the guide RNA hybridizes to the target strand to form an RNA-DNA hybrid and an R-loop.

[2327] Embodiment 264. The complex of embodiment 261, wherein the at least one nucleic acid extension arm comprises (i) a DNA synthesis template, and (ii) a primer binding site.

[2328] Embodiment 265. The complex of embodiment 260, wherein the PEgRNA comprises the nucleotide sequence of SEQ ID NOs: 101-104, 181-183, 223-244, 277, 325-334, 336, 338, 340, 342, 344, 346, 348, 350, 352, 354, 356, 358, 360, 362, 364, 366, 368, 499-505, 735-761, 776-777, or a nucleotide sequence having at least 85%, or at least 90%, or at least 95%, or at least 98%, or at least 99% sequence identity with any one of SEQ ID NOs: 101-104, 181-183, 223-244, 277, 325-334, 336, 338, 340, 342, 344, 346, 348, 350, 352, 354, 356, 358, 360, 362, 364, 366, 368, 499-505, 735-761, 776-777.

[2329] Embodiment 266. The complex of embodiment 264, wherein the DNA synthesis template comprises a nucleotide sequence that is at least 80%, or 85%, or 90%, or 95%, or 99% identical to the endogenous DNA target.

[2330] Embodiment 267. The complex of embodiment 264, wherein the primer binding site hybridizes with a free 3′ end of the cut DNA.

[2331] Embodiment 268. A complex comprising comprising a napDNAbp and an PEgRNA.

[2332] Embodiment 269. The complex of embodiment 268, wherein the napDNAbp is a Cas9 nickase.

[2333] Embodiment 270. The complex of embodiment 268, wherein the napDNAbp comprises an amino acid sequence of SEQ ID NO: 18.

[2334] Embodiment 271. The complex of embodiment 268, wherein the napDNAbp comprises an amino acid sequence having at least 80%, 85%, 90%, 95%, 98%, or 99% sequence identity with the amino acid sequence of any one of SEQ ID NOs: 18-88, 126, 130, 137, 141, 147, 153, 157, 445, 460, 467, and 482-487.

[2335] Embodiment 272. The complex of embodiment 268, wherein the PEgRNA comprises a guide RNA and a nucleic acid extension arm at the 3′ or 5′ end of the guide RNA, or at an intramolecular position in the guide RNA.

[2336] Embodiment 273. The complex of embodiment 268, wherein the PEgRNA is capable of directing the napDNAbp to a target DNA sequence.

[2337] Embodiment 274. The complex of embodiment 272, wherein the target DNA sequence comprises a target strand and a complementary non-target strand, wherein the spacer sequence of the PEgRNA hybridizes to the target strand to form an RNA-DNA hybrid and an R-loop.

[2338] Embodiment 275. The complex of embodiment 273, wherein the nucleic acid extension arm comprises (i) a DNA synthesis template, and (ii) a primer binding site.

[2339] Embodiment 276. The complex of embodiment 269, wherein the PEgRNA comprises the nucleotide sequence of SEQ ID NOs: 101-104, 181-183, 223-244, 277, 325-334, 336, 338, 340, 342, 344, 346, 348, 350, 352, 354, 356, 358, 360, 362, 364, 366, 368, 499-505, 735-761, 776-777, or a nucleotide sequence having at least 85%, or at least 90%, or at least 95%, or at least 98%, or at least 99% sequence identity with any one of SEQ ID NOs: 101-104, 181-183, 223-244, 277, 325-334, 336, 338, 340, 342, 344, 346, 348, 350, 352, 354, 356, 358, 360, 362, 364, 366, 368, 499-505, 735-761, 776-777.

[2340] Embodiment 277. The complex of embodiment 276, wherein the DNA synthesis template comprises a nucleotide sequence that is at least 80%, or 85%, or 90%, or 95%, or 99% identical to the endogenous DNA target.

[2341] Embodiment 278. The complex of embodiment 276, wherein the primer binding site hybridizes with a free 3′ end of the cut DNA.

[2342] Embodiment 279. The complex of embodiment 276, wherein the PEgRNA further comprises at least one additional structure selected from the group consisting of a linker, a stem loop, a hairpin, a toeloop, an aptamer, or an RNA-protein recruitment domain.

[2343] Embodiment 280. A polynucleotide encoding the fusion protein of any of embodiments 213-242.

[2344] Embodiment 281. A vector comprising the polynucleotide of embodiment 280.

[2345] Embodiment 282. A cell comprising the fusion protein of any of embodiments 213-242 and an PEgRNA bound to the napDNAbp of the fusion protein.

[2346] Embodiment 283. A cell comprising a complex of any one of embodiments 260-279.

[2347] Embodiment 284. A pharmaceutical composition comprising: (i) a fusion protein of any of embodiments 213-242, the complex of embodiments 260-279, the polynucleotide of embodiment 68, or the vector of embodiment 69; and (ii) a pharmaceutically acceptable excipient.

[2348] Embodiment 285. A pharmaceutical composition comprising: (i) the complex of embodiments 260-279 (ii) a polymerase provided in trans; and (iii) a pharmaceutically acceptable excipient.

[2349] Embodiment 286. A kit comprising a nucleic acid construct, comprising: (i) a nuleic acid sequencing encoding the fusion protein of any one of embodiments 213-242; and (ii) a promoter that drives expression of the sequence of (i).

[2350] Embodiment 287. A method for installing a desired nucleotide change in a double-stranded DNA sequence, the method comprising:
[2351] (i) contacting the double-stranded DNA sequence with a complex comprising a fusion protein and a PEgRNA, wherein the fusion protein comprises a napDNAbp and a polymerase and wherein the PEgRNA comprises a DNA synthesis template comprising the desired nucleotide change and a primer binding site;
[2352] (ii) nicking the double-stranded DNA sequence, thereby generating a free single-strand DNA having a 3′ end;
[2353] (iii) hybridizing the 3′ end of the free single-strand DNA to the primer binding site, thereby priming the polymerase;
[2354] (iv) polymerizing a strand of DNA from the 3′ end hybridized to the primer binding site, thereby generating a single-strand DNA flap comprising the desired nucleotide change and which is complementary to the DNA synthesis template;
[2355] (v) replacing an endogenous DNA strand adjacent the cut site with the single-strand DNA flap, thereby installing the desired nucleotide change in the double-stranded DNA sequence.

[2356] Embodiment 288. The method of embodiment 287, wherein the step of (v) replacing comprises: (i) hybridizing the single-strand DNA flap to the endogenous DNA strand adjacent the cut site to create a sequence mismatch; (ii) excising the endogenous DNA strand; and (iii) repairing the mismatch to form the desired product comprising the desired nucleotide change in both strands of DNA.

[2357] Embodiment 289. The method of embodiment 288, wherein the desired nucleotide change is a single nucleotide substitution, a deletion, or an insertion.

[2358] Embodiment 290. The method of embodiment 289, wherein the single nucleotide substitution is a transition or a transversion.

[2359] Embodiment 291. The method of embodiment 288, wherein the desired nucleotide change is (1) a G to T substitution, (2) a G to A substitution, (3) a G to C substitution, (4) a T to G substitution, (5) a T to A substitution, (6) a T to C substitution, (7) a C to G substitution, (8) a C to T substitution, (9) a C to A substitution, (10) an A to T substitution, (11) an A to G substitution, or (12) an A to C substitution.

[2360] Embodiment 292. The method of embodiment 288, wherein the desired nucleoid change converts (1) a G:C basepair to a T:A basepair, (2) a G:C basepair to an A:T basepair, (3) a G:C basepair to C:G basepair, (4) a T:A basepair to a G:C basepair, (5) a T:A basepair to an A:T basepair, (6) a T:A basepair to a C:G basepair, (7) a C:G basepair to a G:C basepair, (8) a C:G basepair to a T:A basepair, a C:G basepair to an A:T basepair, (10) an A:T basepair to a T:A basepair, (11) an A:T basepair to a G:C basepair, or (12) an A:T basepair to a C:G basepair.

[2361] Embodiment 293. The method of embodiment 288, wherein the desired nucleotide change is an insertion or deletion of 1, 2, 3, 4, 5, 6, 7, 8, 9, 10, 11, 12, 13, 14, 15, 16, 17, 18, 19, 20, 21, 22, 23, 24, or 25 nucleotides.

[2362] Embodiment 294. The method of embodiment 288, wherein the desired nucleotide change corrects a disease-associated gene.

[2363] Embodiment 295. The method of embodiment 294, wherein the disease-associated gene is associated with a monogentic disorder selected from the group consisting of: Adenosine Deaminase (ADA) Deficiency; Alpha-1 Antitrypsin Deficiency; Cystic Fibrosis; Duchenne Muscular Dystrophy; Galactosemia; Hemochromatosis; Huntington's Disease; Maple Syrup Urine Disease; Marfan Syndrome; Neurofibromatosis Type 1; Pachyonychia Congenita; Phenylkeotnuria; Severe Combined Immunodeficiency; Sickle Cell Disease; Smith-Lemli-Opitz Syndrome; a trinucleotide repeat disorder; a prion disease; and Tay-Sachs Disease.

[2364] Embodiment 296. The method of embodiment 294, wherein the disease-associated gene is associated with a polygenic disorder selected from the group consisting of:
[2365] heart disease; high blood pressure; Alzheimer's disease; arthritis; diabetes; cancer; and
[2366] obesity.

[2367] Embodiment 297. The method of embodiment 287, wherein the napDNAbp is a nuclease dead Cas9 (dCas9), a Cas9 nickase (nCas9), or a nuclease active Cas9.

[2368] Embodiment 298. The method of embodiment 287, wherein the napDNAbp comprises an amino acid sequence of SEQ ID NO: 18, or an amino acid sequence having at least 80%, 85%, 90%, 95%, 98%, or 99% sequence identity with the amino acid sequence of SEQ ID NO: 18.

[2369] Embodiment 299. The method of embodiment 287, wherein the napDNAbp comprises an amino acid sequence having at least 80%, 85%, 90%, 95%, 98%, or 99% sequence identity with the amino acid sequence of any one of SEQ ID NOs: 18-88, 126, 130, 137, 141, 147, 153, 157, 445, 460, 467, and 482-487.

[2370] Embodiment 300. The method of embodiment 287, wherein the polymerase is a reverse transcriptase comprising any one of the amino acid sequences of SEQ ID NOs: 89-100, 105-122, 128-129, 132, 139, 143, 149, 154, 159, 235, 454, 471, 516, 662, 700, 701-716, 739-741, and 766.

[2371] Embodiment 301. The method of embodiment 287, wherein the polymerase is a reverse transcriptase comprising an amino acid sequence having at least 80%, 85%, 90%, 95%, 98%, or 99% sequence identity with the amino acid sequence of any one of SEQ ID NOs: 89-100, 105-122, 128-129, 132, 139, 143, 149, 154, 159, 235, 454, 471, 516, 662, 700, 701-716, 739-741, and 766.

[2372] Embodiment 302. The method of embodiment 287, wherein the PEgRNA comprises a nucleic acid extension arm at the 3′ or 5′ ends or at an intramolecular location in the guide RNA, wherein the extension arm comprises the DNA synthesis template sequence and the primer binding site.

[2373] Embodiment 303. The method of embodiment 302, wherein the extension arm is at least 5 nucleotides, at least 6 nucleotides, at least 7 nucleotides, at least 8 nucleotides, at least 9 nucleotides, at least 10 nucleotides, at least 11 nucleotides, at least 12 nucleotides, at least 13 nucleotides, at least 14 nucleotides, at least 15 nucleotides, at least 16 nucleotides, at least 17 nucleotides, at least 18 nucleotides, at least 19 nucleotides, at least 20 nucleotides, at least 21 nucleotides, at least 22 nucleotides, at least 23 nucleotides, at least 24 nucleotides, or at least 25 nucleotides in length.

[2374] Embodiment 304. The method of embodiment 287, wherein the PEgRNA has a nucleotide sequence selected from the group consisting of SEQ ID NOs: 101-104, 181-183, 223-244, 277, 325-334, 336, 338, 340, 342, 344, 346, 348, 350, 352, 354, 356, 358, 360, 362, 364, 366, 368, 499-505, 735-761, 776-777.

[2375] Embodiment 305. A method for introducing one or more changes in the nucleotide sequence of a DNA molecule at a target locus, comprising:
[2376] (i) contacting the DNA molecule with a nucleic acid programmable DNA binding protein (napDNAbp) and a PEgRNA which targets the napDNAbp to the target locus, wherein the PEgRNA comprises a reverse transcriptase (RT) template sequence comprising at least one desired nucleotide change and a primer binding site;
[2377] (ii) forming an exposed 3′ end in a DNA strand at the target locus;
[2378] (iii) hybridizing the exposed 3′ end to the primer binding site to prime reverse transcription;
[2379] (iv) synthesizing a single strand DNA flap comprising the at least one desired nucleotide change based on the RT template sequence by reverse transcriptase;
[2380] (v) and incorporating the at least one desired nucleotide change into the corresponding endogenous DNA, thereby introducing one or more changes in the nucleotide sequence of the DNA molecule at the target locus.

[2381] Embodiment 306. The method of embodiment 305, wherein the one or more changes in the nucleotide sequence comprises a transition.

[2382] Embodiment 307. The method of embodiment 306, wherein the transition is selected from the group consisting of: (a) T to C; (b) A to G; (c) C to T; and (d) G to A.

[2383] Embodiment 308. The method of embodiment 305, wherein the one or more changes in the nucleotide sequence comprises a transversion.

[2384] Embodiment 309. The method of embodiment 308, wherein the transversion is selected from the group consisting of: (a) T to A; (b) T to G; (c) C to G; (d) C to A; (e) A to T; (f) A to C; (g) G to C; and (h) G to T.

[2385] Embodiment 310. The method of embodiment 305, wherein the one or more changes in the nucleotide sequence comprises changing (1) a G:C basepair to a T:A basepair, (2) a G:C basepair to an A:T basepair, (3) a G:C basepair to C:G basepair, (4) a T:A basepair to a G:C basepair, (5) a T:A basepair to an A:T basepair, (6) a T:A basepair to a C:G basepair, (7) a C:G basepair to a G:C basepair, (8) a C:G basepair to a T:A basepair, (9) a

[2386] C:G basepair to an A:T basepair, (9) an A:T basepair to a T:A basepair, (11) an A:T basepair to a G:C basepair, or (12) an A:T basepair to a C:G basepair.

[2387] Embodiment 311. The method of embodiment 305, wherein the one or more changes in the nucleotide sequence comprises an insertion or deletion of 1, 2, 3, 4, 5, 6, 7, 8, 9, 10, 11, 12, 13, 14, 15, 16, 17, 18, 19, 20, 21, 22, 23, 24, or 25 nucleotides.

[2388] Embodiment 312. The method of embodiment 305, wherein the one or more changes in the nucleotide sequence comprises a correction to a disease-associated gene.

[2389] Embodiment 313. The method of embodiment 312, wherein the disease-associated gene is associated with a monogentic disorder selected from the group consisting of: Adenosine Deaminase (ADA) Deficiency; Alpha-1 Antitrypsin Deficiency; Cystic Fibrosis; Duchenne Muscular Dystrophy; Galactosemia; Hemochromatosis; Huntington's Disease; Maple Syrup Urine Disease; Marfan Syndrome; Neurofibromatosis Type 1; Pachyonychia Congenita; Phenylkeotnuria; Severe Combined Immunodeficiency; Sickle Cell Disease; Smith-Lemli-Opitz Syndrome; a trinucleotide repeat disorder; a prion disease; and Tay-Sachs Disease.

[2390] Embodiment 314. The method of embodiment 312, wherein the disease-associated gene is associated with a polygenic disorder selected from the group consisting of: heart disease; high blood pressure; Alzheimer's disease; arthritis; diabetes; cancer; and obesity.

[2391] Embodiment 315. The method of embodiment 305, wherein the napDNAbp is a nuclease active Cas9 or variant thereof.

[2392] Embodiment 316. The method of embodiment 305, wherein the napDNAbp is a nuclease inactive Cas9 (dCas9) or Cas9 nickase (nCas9), or a variant thereof.

[2393] Embodiment 317. The method of embodiment 305, wherein the napDNAbp comprises an amino acid sequence of SEQ ID NO: 18, or an amino acid sequence having at least 80%, 85%, 90%, 95%, 98%, or 99% sequence identity with SEQ ID NO: 18.

[2394] Embodiment 318. The method of embodiment 305, wherein the napDNAbp comprises an amino acid sequence having at least 80%, 85%, 90%, 95%, 98%, or 99% sequence identity with the amino acid sequence of any one of SEQ ID NOs: 18-88, 126, 130, 137, 141, 147, 153, 157, 445, 460, 467, and 482-487.

[2395] Embodiment 319. The method of embodiment 305, wherein the reverse transcriptase is introduced in trans.

[2396] Embodiment 320. The method of embodiment 305, wherein the napDNAbp comprises a fusion to a reverse transcriptase.

[2397] Embodiment 321. The method of embodiment 305, wherein the reverse transcriptase comprises any one of the amino acid sequences of SEQ ID NOs: 89-100, 105-122, 128-129, 132, 139, 143, 149, 154, 159, 235, 454, 471, 516, 662, 700, 701-716, 739-741, and 766.

[2398] Embodiment 322. The method of embodiment 305, wherein the reverse transcriptase comprises an amino acid sequence having at least 80%, 85%, 90%, 95%, 98%, or 99% sequence identity with the amino acid sequence of any one of SEQ ID NOs: 89-100, 105-122, 128-129, 132, 139, 143, 149, 154, 159, 235, 454, 471, 516, 662, 700, 701-716, 739-741, and 766.

[2399] Embodiment 323. The method of embodiment 305, wherein the step of forming an exposed 3′ end in the DNA strand at the target locus comprises nicking the DNA strand with a nuclease.

[2400] Embodiment 324. The method of embodiment 323, wherein the nuclease is provided is provided in trans.

[2401] Embodiment 325. The method of embodiment 305, wherein the step of forming an exposed 3′ end in the DNA strand at the target locus comprises contacting the DNA strand with a chemical agent.

[2402] Embodiment 326. The method of embodiment 305, wherein the step of forming an exposed 3′ end in the DNA strand at the target locus comprises introducing a replication error.

[2403] Embodiment 327. The method of embodiment 305, wherein the step of contacting the DNA molecule with the napDNAbp and the guide RNA forms an R-loop.

[2404] Embodiment 328. The method of embodiment 327, wherein the DNA strand in which the exposed 3′ end is formed is in the R-loop.

[2405] Embodiment 329. The method of embodiment 315, wherein the PEgRNA comprises an extension arm that comprises the reverse transcriptase (RT) template sequence and the primer binding site.

[2406] Embodiment 330. The method of embodiment 329, wherein the extension arm is at the 3′ end of the guide RNA, the 5′ end of the guide RNA, or at an intramolecular position in the guide RNA.

[2407] Embodiment 331. The method of embodiment 305, wherein the PEgRNA further comprises at least one additional structure selected from the group consisting of a linker, a stem loop, a hairpin, a toeloop, an aptamer, or an RNA-protein recruitment domain.

[2408] Embodiment 332. The method of embodiment 305, wherein the PEgRNA further comprises a homology arm.

[2409] Embodiment 333. The method of embodiment 305, wherein the RT template sequence is homologous to the corresponding endogenous DNA.

[2410] Embodiment 334. A method for introducing one or more changes in the nucleotide sequence of a DNA molecule at a target locus by target-primed reverse transcription, the method comprising: (a) contacting the DNA molecule at the target locus with a (i) fusion protein comprising a nucleic acid programmable DNA binding protein (napDNAbp) and a reverse transcriptase and (ii) a guide RNA comprising an RT template comprising a desired nucleotide change; (b) conducting target-primed reverse transcription of the RT template to generate a single strand DNA comprising the desired nucleotide change; and (c) incorporating the desired nucleotide change into the DNA molecule at the target locus through a DNA repair and/or replication process.

[2411] Embodiment 335. The method of embodiment 334, wherein the RT template is located at the 3′ end of the guide RNA, the 5′ end of the guide RNA, or at an intramolecular location in the guide RNA.

[2412] Embodiment 336. The method of embodiment 334, wherein the desired nucleotide change comprises a transition, a transversion, an insertion, or a deletion, or any combination thereof.

[2413] Embodiment 337. The method of embodiment 334, wherein the desired nucleotide change comprises a transition selected from the group consisting of: (a) T to C; (b) A to G; (c) C to T; and (d) G to A.

[2414] Embodiment 338. The method of clami 334, wherein the desired nucleotide change comprises a transversion selected from the group consisting of: (a) T to A; (b) T to G; (c) C to G; (d) C to A; (e) A to T; (f) A to C; (g) G to C; and (h) G to T.

[2415] Embodiment 339. The method of embodiment 334, wherein the desired nucleotide change comprises changing (1) a G:C basepair to a T:A basepair, (2) a G:C basepair to an A:T basepair, (3) a G:C basepair to C:G basepair, (4) a T:A basepair to a G:C basepair, (5) a T:A basepair to an A:T basepair, (6) a T:A basepair to a C:G basepair, (7) a C:G basepair to a G:C basepair, (8) a C:G basepair to a T:A basepair, (9) a C:G basepair to an A:T basepair, (10) an A:T basepair to a T:A basepair, (11) an A:T basepair to a G:C basepair, or (12) an A:T basepair to a C:G basepair.

[2416] Embodiment 340. A polynucleotide encoding the PEgRNA of any one of embodiments 243-259.

[2417] Embodiment 341. A vector comprising the polynucleotide of embodiment 340.

[2418] Embodiment 342. A cell comprising the vector of embodiment 341.

[2419] Embodiment 343. The fusion protein of embodiment 213, wherein the polymerase is an error-prone reverse transcriptase.

[2420] Embodiment 344. A method for mutagenizing a DNA molecule at a target locus by target-primed reverse transcription, the method comprising: (a) contacting the DNA molecule at the target locus with a (i) fusion protein comprising a nucleic acid programmable DNA binding protein (napDNAbp) and an error-prone reverse transcriptase and (ii) a guide RNA comprising an RT template comprising a desired nucleotide change; (b) conducting target-primed reverse transcription of the RT template to generate a mutagenized single strand DNA; and (c) incorporating the mutagenized single strand DNA into the DNA molecule at the target locus through a DNA repair and/or replication process.

[2421] Embodiment 345. The method of any prior embodiment, wherein the fusion protein comprises the amino acid sequence of PE1, PE2, or PE3.

[2422] Embodiment 346. The method of any prior embodiment, wherein the napDNAbp is a Cas9 nickase (nCas9).

[2423] Embodiment 347. The method of embodiment 344, wherein the napDNAbp comprises the amino acid sequence of SEQ ID NOs: 18-88, 126, 130, 137, 141, 147, 153, 157, 445, 460, 467, and 482-487.

[2424] Embodiment 348. The method of embodiment 344, wherein the guide RNA comprises SEQ ID NO: 222.

[2425] Embodiment 349. The method of embodiment 344, wherein the step of (b) conducting target-primed reverse transcription comprises generating a 3′ end primer binding sequence at the target locus that is capable of priming reverse transcription by annealing to a primer binding site on the guide RNA.

[2426] Embodiment 350. A method for replacing a trinucleotide repeat expansion mutation in a target DNA molecule with a healthy sequence comprising a healthy number of repeat trinucleotides, the method comprising: (a) contacting the DNA molecule at the target locus with a (i) fusion protein comprising a nucleic acid programmable DNA binding protein (napDNAbp) and a polymerase and (ii) a PEgRNA comprising DNA synthesis template comprising the replacement sequence and a primer binding site; (b) conducting prime editing to generate a single strand DNA comprising the replacement sequence; and (c) incorporating the single strand DNA into the DNA molecule at the target locus through a DNA repair and/or replication process.

[2427] Embodiment 351. The method of embodiment 350, wherein the fusion protein comprises the amino acid sequence of PE1, PE2, or PE3.

[2428] Embodiment 352. The method of embodiment 350, wherein the napDNAbp is a Cas9 nickase (nCas9).

[2429] Embodiment 353. The method of embodiment 350, wherein the napDNAbp comprises the amino acid sequence of SEQ ID NOs: 18-88, 126, 130, 137, 141, 147, 153, 157, 445, 460, 467, and 482-487.

[2430] Embodiment 354. The method of embodiment 350, wherein the guide RNA comprises SEQ ID NO: 222.

[2431] Embodiment 355. The method of embodiment 350, wherein the step of (b) conducting prime editing comprises generating a 3′ end primer binding sequence at the target locus that is capable of priming polymerase by annealing to the primer binding site on the guide RNA.

[2432] Embodiment 356. The method of embodiment 350, wherein the trinucleotide repeat expansion mutation is associated with Huntington's Disease, Fragile X syndrome, or Friedreich's ataxia.

[2433] Embodiment 357. The method of embodiment 350, wherein the trinucleotide repeat expansion mutation comprises a repeating unit of CAG triplets.

[2434] Embodiment 358. The method of embodiment 350, wherein the trinucleotide repeat expansion mutation comprises a repeating unit of GAA triplets.

[2435] Embodiment 359. A method of installing a functional moiety in a protein of interest encoded by a target nucleotide sequence by prime editing, the method comprising: (a) contacting the target nucleotide sequence with a (i) prime editor comprising a nucleic acid programmable DNA binding protein (napDNAbp) and a polymerase and (ii) a PEgRNA comprising DNA synthesis template encoding the functional moiety; (b) polymerizing a single strand DNA sequence encoding the functional moiety; and (c) incorporating the single strand DNA sequence in place of a corresponding endogenous strand at the target nucleotide sequence through a DNA repair and/or replication process, wherein the method produces a recombinant target nucleotide sequence that encodes a fusion protein comprising the protein of interest and the functional moiety.

[2436] Embodiment 360. The method of embodiment 359, wherein functional moiety is peptide tag.

[2437] Embodiment 361. The method of embodiment 360, wherein the peptide tag is an affinity tag, solubilization tag, chromatography tag, epitope or immunoepitope tag, or a fluorescence tag.

[2438] Embodiment 362. The method of embodiment 360, wherein the peptide tag is selected from the group consisting of: AviTag (SEQ ID NO: 245); C-tag (SEQ ID NO: 246); Calmodulin-tag (SEQ ID NO: 247); polyglutamate tag (SEQ ID NO: 248); E-tag (SEQ ID NO: 249); FLAG-tag (SEQ ID NO: 2); HA-tag (SEQ ID NO: 5); His-tag (SEQ ID NOs: 252-262); Myc-tag (SEQ ID NO: 6); NE-tag (SEQ ID NO: 264); Rho1D4-tag (SEQ ID NO: 265); S-tag (SEQ ID NO: 266); SBP-tag (SEQ ID NO: 267); Softag-1 (SEQ ID NO: 268); Softag-2 (SEQ ID NO: 269); Spot-tag (SEQ ID NO: 270); Strep-tag (SEQ ID NO: 271); TC tag (SEQ ID NO: 272); Ty tag (SEQ ID NO: 273); V5 tag (SEQ ID NO: 3); VSV-tag (SEQ ID NO: 275); and Xpress tag (SEQ ID NO: 276).

[2439] Embodiment 363. The method of embodiment 360, wherein the peptide tag is selected from the group consisting of: AU1 epitope (SEQ ID NO: 278); AU5 epitope (SEQ ID NO: 279); Bacteriophage T7 epitope (T7-tag) (SEQ ID NO: 280); Bluetongue virus tag (B-tag) (SEQ ID NO: 281); E2 epitope (SEQ ID NO: 282); Histidine affinity tag (HAT) (SEQ ID NO: 283); HSV epitope (SEQ ID NO: 284); Polyarginine (Arg-tag) (SEQ ID NO: 285); Polyaspartate (Asp-tag) (SEQ ID NO: 286); Polyphenylalanine (Phe-tag) (SEQ ID NO: 287); S1-tag (SEQ ID NO: 288); S-tag (SEQ ID NO: 266); and VSV-G (SEQ ID NO: 275).

[2440] Embodiment 364. The method of embodiment 359, wherein the functional moiety is an immunoepitope.

[2441] Embodiment 365. The method of embodiment 364, wherein the immunoepitope is selected from the group consisting of: tetanus toxoid (SEQ ID NO: 396); diphtheria toxin mutant CRM197 (SEQ ID NO: 630); mumps immunoepitope 1 (SEQ ID NO: 400); mumps immunoepitope 2 (SEQ ID NO: 402); mumps immunoeptitope 3 (SEQ ID NO: 404); rubella virus (SEQ ID NO: 406); hemagglutinin (SEQ ID NO: 408); neuraminidase (SEQ ID NO: 410); TAP1 (SEQ ID NO: 412); TAP2 (SEQ ID NO: 414); hemagglutinin epitopes toward class I HLA (SEQ ID NO: 416); neuraminidase epitopes toward class I HLA (SEQ ID NO: 418); hemagglutinin epitopes toward class II HLA (SEQ ID NO: 420); neuraminidase epitopes toward class II HLA (SEQ ID NO: 422); hemagglutinin epitope H5N1-bound class I and class II HLA (SEQ ID NO: 424); neuraminidase epitope H5N1-bound class I and class II HLA (SEQ ID NO: 426).

[2442] Embodiment 366. The method of embodiment 359, wherein the functional moiety alters the localization of the protein of interest.

[2443] Embodiment 367. The method of embodiment 359, wherein the functional moiety is a degradation tag such that the degradation rate of the protein of interest is altered.

[2444] Embodiment 368. The method of embodiment 367, wherein the degradation tag results in the elimination of the tagged protein.

[2445] Embodiment 369. The method of embodiment 359, wherein the functional moiety is a small molecule binding domain.

[2446] Embodiment 370. The method of embodiment 359, wherein the small molecule binding domain is FKBP12 of SEQ ID NO: 488.

[2447] Embodiment 371. The method of embodiment 359, wherein the small molecule binding domain is FKBP12-F36V of SEQ ID NO: 489.

[2448] Embodiment 372. The method of embodiment 359, wherein the small molecule binding domain is cyclophilin of SEQ ID NOs: 490 and 493-494.

[2449] Embodiment 373. The method of embodiment 359, wherein the small molecule binding domain is installed in two or more proteins of interest.

[2450] Embodiment 374. The method of embodiment 373, wherein the two or more proteins of interest may dimerize upon contacting with a small molecule.

[2451] Embodiment 375. The method of embodiment 369, wherein the small molecule is a dimer of a small molecule selected from the group consisting of those compounds disclosed in Embodiment 163 of Group 1.

[2452] Embodiment 376. A method of installing an immunoepitope in a protein of interest encoded by a target nucleotide sequence by prime editing, the method comprising: (a) contacting the target nucleotide sequence with a (i) prime editor comprising a nucleic acid programmable DNA binding protein (napDNAbp) and a polymerase and (ii) a PEgRNA comprising an edit template encoding the functional moiety; (b) polymerizing a single strand DNA sequence encoding the immunoepitope; and (c) incorporating the single strand DNA sequence in place of a corresponding endogenous strand at the target nucleotide sequence through a DNA repair and/or replication process, wherein the method produces a recombinant target nucleotide sequence that encodes a fusion protein comprising the protein of interest and the immunoepitope.

[2453] Embodiment 377. The method of embodiment 376, wherein the immunoepitope is selected from the group consisting of: tetanus toxoid (SEQ ID NO: 396); diphtheria toxin mutant CRM197 (SEQ ID NO: 630); mumps immunoepitope 1 (SEQ ID NO: 400); mumps immunoepitope 2 (SEQ ID NO: 402); mumps immunoeptitope 3 (SEQ ID NO: 404); rubella virus (SEQ ID NO: 406); hemagglutinin (SEQ ID NO: 408); neuraminidase (SEQ ID NO: 410); TAP1 (SEQ ID NO: 412); TAP2 (SEQ ID NO: 414); hemagglutinin epitopes toward class I HLA (SEQ ID NO: 416); neuraminidase epitopes toward class I HLA (SEQ ID NO: 418); hemagglutinin epitopes toward class II HLA (SEQ ID NO: 420); neuraminidase epitopes toward class II HLA (SEQ ID NO: 422); hemagglutinin epitope H5N1-bound class I and class II HLA (SEQ ID NO: 424); neuraminidase epitope H5N1-bound class I and class II HLA (SEQ ID NO: 426).

[2454] Embodiment 378. The method of embodiment 376, wherein the fusion protein comprises the amino acid sequence of PE1, PE2, or PE3.

[2455] Embodiment 379. The method of embodiment 376, wherein the napDNAbp is a Cas9 nickase (nCas9).

[2456] Embodiment 380. The method of embodiment 376, wherein the napDNAbp comprises the amino acid sequence of SEQ ID NOs: 18-88, 126, 130, 137, 141, 147, 153, 157, 445, 460, 467, and 482-487.

[2457] Embodiment 381. The method of embodiment 376, wherein the PEgRNA comprises SEQ ID NOs: 101-104, 181-183, 223-244, 277, 325-334, 336, 338, 340, 342, 344, 346, 348, 350, 352, 354, 356, 358, 360, 362, 364, 366, 368, 499-505, 735-761, 776-777.

[2458] Embodiment 382. A method of installing a small molecule dimerization domain in a protein of interest encoded by a target nucleotide sequence by prime editing, the method comprising: (a) contacting the target nucleotide sequence with a (i) prime editor comprising a nucleic acid programmable DNA binding protein (napDNAbp) and a polymerase and (ii) a PEgRNA comprising an edit template encoding the small molecule dimerization domain; (b) polymerizing a single strand DNA sequence encoding the immunoepitope; and (c) incorporating the single strand DNA sequence in place of a corresponding endogenous strand at the target nucleotide sequence through a DNA repair and/or replication process, wherein the method produces a recombinant target nucleotide sequence that encodes a fusion protein comprising the protein of interest and the small molecule dimerization domain.

[2459] Embodiment 383. The method of embodiment 382, further comprising conducting the method on a second protein of interest.

[2460] Embodiment 384. The method of embodiment 383, wherein the first protein of interest and the second protein of interest dimerize in the presence of a small molecule that binds to the dimerization domain on each of said proteins.

[2461] Embodiment 385. The method of embodiment 382, wherein the small molecule binding domain is FKBP12 of SEQ ID NO: 488.

[2462] Embodiment 386. The method of embodiment 382, wherein the small molecule binding domain is FKBP12-F36V of SEQ ID NO: 489.

[2463] Embodiment 387. The method of embodiment 382, wherein the small molecule binding domain is cyclophilin of SEQ ID NOs: 490 and 493-494.

[2464] Embodiment 388. The method of embodiment 382, wherein the small molecule is a dimer of a small molecule selected from the group consisting of those compounds disclosed in Embodiment 163 of Group 1.

[2465] Embodiment 389. The method of embodiment 382, wherein the fusion protein comprises the amino acid sequence of PE1, PE2, or PE3.

[2466] Embodiment 390. The method of embodiment 382, wherein the napDNAbp is a Cas9 nickase (nCas9).

[2467] Embodiment 391. The method of embodiment 382, wherein the napDNAbp comprises the amino acid sequence of SEQ ID NOs: 18-88, 126, 130, 137, 141, 147, 153, 157, 445, 460, 467, and 482-487.

[2468] Embodiment 392. The method of embodiment 382, wherein the PEgRNA comprises SEQ ID NOs: 101-104, 181-183, 223-244, 277, 325-334, 336, 338, 340, 342, 344, 346, 348, 350, 352, 354, 356, 358, 360, 362, 364, 366, 368, 499-505, 735-761, 776-777.

[2469] Embodiment 393. A method of installing a peptide tag or epitope onto a protein using prime editing, comprising: contacting a target nucleotide sequence encoding the protein with a prime editor construct configured to insert therein a second nucleotide sequence encoding the peptide tag to result in a recombinant nucleotide sequence, such that the peptide tag and the protein are expressed from the recombinant nucleotide sequence as a fusion protein.

[2470] Embodiment 394. The method of embodiment 383, wherein the peptide tag is used for purification and/or detection of the protein.

[2471] Embodiment 395. The method of embodiment 383, wherein the peptide tag is a poly-histidine (e.g., HHHHHH) (SEQ ID NO: 252-262), FLAG (e.g., DYKDDDDK) (SEQ ID NO: 2), V5 (e.g., GKPIPNPLLGLDST) (SEQ ID NO: 3), GCN4, HA (e.g., YPYDVPDYA) (SEQ ID NO: 5), Myc (e.g. EQKLISEED) (SEQ ID NO: 6), or GST.

[2472] Embodiment 396. The method of embodiment 383, wherein the peptide tag has an amino acid sequence selected from the group consisting of SEQ ID NO: 1-6, 245-249, 252-262, 264-273, 275-276, 281, 278-288, and 622.

[2473] Embodiment 397. The method of embodiment 383, wherein the peptide tag is fused to the protein by a linker.

[2474] Embodiment 398. The method of embodiment 383, wherein the fusion protein has the following structure: [protein]-[peptide tag] or [peptide tag]-[protein], wherein “]-[” represents an optional linker.

[2475] Embodiment 399. The method of embodiment 383, wherein the linker has an amino acid sequence of SEQ ID NO: 127, 165-176, 446, 453, and 767-769.

[2476] Embodiment 400. The method of embodiment 383, wherein the prime editor construct comprises a PEgRNA comprising the nucleotide sequence of SEQ ID NOs: 101-104, 181-183, 223-244, 277, 325-334, 336, 338, 340, 342, 344, 346, 348, 350, 352, 354, 356, 358, 360, 362, 364, 366, 368, 499-505, 735-761, 776-777.

[2477] Embodiment 401. The method of embodiment 383, wherein the PEgRNA comprises a spacer, a gRNA core, and an extension arm, wherein the spacer is complementary to the target nucleotide sequence and the extension arm comprises a reverse transcriptase template that encodes the peptide tag.

[2478] Embodiment 402. The method of embodiment 383, wherein the PEgRNA comprises a spacer, a gRNA core, and an extension arm, wherein the spacer is complementary to the target nucleotide sequence and the extension arm comprises a reverse transcriptase template that encodes the peptide tag.

[2479] Embodiment 403. A method of preventing or halting the progression of a prion disease by installing on or more protective mutations into PRNP encoded by a target nucleotide sequence by prime editing, the method comprising: (a) contacting the target nucleotide sequence with a (i) prime editor comprising a nucleic acid programmable DNA binding protein (napDNAbp) and a polymerase and (ii) a PEgRNA comprising an edit template encoding the functional moiety; (b) polymerizing a single strand DNA sequence encoding the protective mutation; and (c) incorporating the single strand DNA sequence in place of a corresponding endogenous strand at the target nucleotide sequence through a DNA repair and/or replication process, wherein the method produces a recombinant target nucleotide sequence that encodes a PRNP comprising a protective mutation and which is resistant to misfolding.

[2480] Embodiment 404. The method of embodiment 403, wherein the prion disease is a human prion disease.

[2481] Embodiment 405. The method of embodiment 403, wherein the prion disease is an animal prion disease.

[2482] Embodiment 406. The method of embodiment 404, wherein the prion disease is Creutzfeldt-Jakob Disease (CJD), Variant Creutzfeldt-Jakob Disease (νCJD), Gerstmann-Straussler-Scheinker Syndrome, Fatal Familial Insomnia, or Kuru.

[2483] Embodiment 407. The method of embodiment 403, wherein the prion disease is Bovine Spongiform Encephalopathy (BSE or “mad cow disease”), Chronic Wasting Disease (CWD), Scrapie, Transmissible Mink Encephalopathy, Feline Spongiform Encephalopathy, and Ungulate Spongiform Encephalopathy.

[2484] Embodiment 408. The method of embodiment 403, wherein the wildtype PRNP amino acid sequence is SEQ ID NOs: 291-292.

[2485] Embodiment 409. The method of embodiment 403, wherein the method results in a modified PRNP amino acid sequence selected from the group consisting of SEQ ID NOs: 293-309, 311-323, wherein said modified PRNP protein is resistant to misfolding.

[2486] Embodiment 410. The method of embodiment 403, wherein the fusion protein comprises the amino acid sequence of PE1, PE2, or PE3.

[2487] Embodiment 411. The method of embodiment 403, wherein the napDNAbp is a Cas9 nickase (nCas9).

[2488] Embodiment 412. The method of embodiment 403, wherein the napDNAbp comprises the amino acid sequence of SEQ ID NOs: 18-88, 126, 130, 137, 141, 147, 153, 157, 445, 460, 467, and 482-487.

[2489] Embodiment 413. The method of embodiment 403, wherein the PEgRNA comprises SEQ ID NOs: 101-104, 181-183, 223-244, 277, 325-334, 336, 338, 340, 342, 344, 346, 348, 350, 352, 354, 356, 358, 360, 362, 364, 366, 368, 499-505, 735-761, 776-777.

[2490] Embodiment 414. A method of installing a ribonucleotide motif or tag in an RNA of interest encoded by a target nucleotide sequence by prime editing, the method comprising: (a) contacting the target nucleotide sequence with a (i) prime editor comprising a nucleic acid programmable DNA binding protein (napDNAbp) and a polymerase and (ii) a PEgRNA comprising an edit template encoding the ribonucleotide motif or tag; (b) polymerizing a single strand DNA sequence encoding the ribonucleotide motif or tag; and (c) incorporating the single strand DNA sequence in place of a corresponding endogenous strand at the target nucleotide sequence through a DNA repair and/or replication process, wherein the method produces a recombinant target nucleotide sequence that encodes a modified RNA of interest comprising the ribonucleotide motif or tag.

[2491] Embodiment 415. The method of embodiment 414, wherein ribonucleotide motif or tag is a detection moiety.

[2492] Embodiment 416. The method of embodiment 414, wherein the ribonucleotide motif or tag affects the expression level of the RNA of interest.

[2493] Embodiment 417. The method of embodiment 414, wherein the ribonucleotide motif or tag affects the transport or subcellular location of the RNA of interest.

[2494] Embodiment 418. The method of embodiment 414, wherein the ribonucleotide motif or tag is selected from the group consisting of SV40 type 1, SV40 type 2, SV40 type 3, hGH, BGH, rbGlob, TK, MALAT1 ENE-mascRNA, KSHV PAN ENE, Smbox/U1 snRNA box, U1 snRNA 3′ box, tRNA-lysine, broccoli aptamer, spinach aptamer, mango aptamer, HDV ribozyme, and m6A.

[2495] Embodiment 419. The method of embodiment 414, wherein the PEgRNA comprises SEQ ID NOs: 101-104, 181-183, 223-244, 277, 325-334, 336, 338, 340, 342, 344, 346, 348, 350, 352, 354, 356, 358, 360, 362, 364, 366, 368, 499-505, 735-761, 776-777.

[2496] Embodiment 420. The method of embodiment 414, wherein the fusion protein comprises the amino acid sequence of PE1, PE2, or PE3.

[2497] Embodiment 421. The method of embodiment 414, wherein the napDNAbp is a Cas9 nickase (nCas9).

[2498] Embodiment 422. The method of embodiment 414, wherein the napDNAbp comprises the amino acid sequence of SEQ ID NOs: 18-88, 126, 130, 137, 141, 147, 153, 157, 445, 460, 467, and 482-487.

[2499] Embodiment 423. A method of installing or deleting a functional moiety in a protein of interest encoded by a target nucleotide sequence by prime editing, the method comprising: (a) contacting the target nucleotide sequence with a (i) prime editor comprising a nucleic acid programmable DNA binding protein (napDNAbp) and a polymerase and (ii) a PEgRNA comprising an edit template encoding the functional moiety or deletion of same; (b) polymerizing a single strand DNA sequence encoding the functional moiety or deletion of same; and (c) incorporating the single strand DNA sequence in place of a corresponding endogenous strand at the target nucleotide sequence through a DNA repair and/or replication process, wherein the method produces a recombinant target nucleotide sequence that encodes a modified protein comprising the protein of interest and the functional moiety or the removal of same, wherein the functional moiety alters a modification state or localization state of the protein.

[2500] Embodiment 424. The method of embodiment 423, wherein functional moiety alters the phosphorylation, ubiquitylation, glycosylation, lipidation, hydroxylation, methylation, acetylation, crotonylation, SUMOylation state of the protein of interest.

[2501] Embodiment 425. A fusion protein comprising a nucleic acid programmable DNA binding protein (napDNAbp) domain and a domain comprising an RNA-dependent DNA polymerase activity.

[2502] Embodiment 426. The fusion protein of embodiment 425, wherein the fusion protein is capable of carrying out prime editing in the presence of an prime editing guide RNA (PEgRNA) to install a desired nucleotide change in a target sequence.

[2503] Embodiment 427. The fusion protein of embodiment 425, wherein the napDNAbp domain has a nickase activity.

[2504] Embodiment 428. The fusion protein of embodiment 425, wherein the napDNAbp domain is a Cas9 protein orvariant thereof.

[2505] Embodiment 429. The fusion protein of embodiment 425, wherein the napDNAbp domain is a nuclease active Cas9, a nuclease inactive Cas9 (dCas9), or a Cas9 nickase (nCas9).

[2506] Embodiment 430. The fusion protein of embodiment 425, wherein the napDNAbp domain is Cas9 nickase (nCas9).

[2507] Embodiment 431. The fusion protein of embodiment 425, wherein the napDNAbp domain is selected from the group consisting of: Cas9, Cas12e, Cas12d, Cas12a, Cas12b1, Cas13a, Cas12c, and Argonaute and optionally has a nickase activity.

[2508] Embodiment 432. The fusion protein of embodiment 425, wherein the domain comprising an RNA-dependent DNA polymerase activity is a reverse transcriptase comprising any one of the amino acid sequences of SEQ ID NOs: 89-100, 105-122, 128-129, 132, 139, 143, 149, 154, 159, 235, 454, 471, 516, 662, 700, 701-716, 739-741, and 766.

[2509] Embodiment 433. The fusion protein of embodiment 425, wherein the domain comprising an RNA-dependent DNA polymerase activity is a reverse transcriptase comprising an amino acid sequence having at least 80%, 85%, 90%, 95%, 98%, or 99% sequence identity with the amino acid sequence of any one of SEQ ID NOs: 89-100, 105-122, 128-129, 132, 139, 143, 149, 154, 159, 235, 454, 471, 516, 662, 700, 701-716, 739-741, and 766, and optionally wherein the domain comprising an RNA-dependent DNA polymerase is error-prone.

[2510] Embodiment 434. The fusion protein of embodiment 425, wherein the domain comprising an RNA-dependent DNA polymerase activity is a naturally-occurring reverse transcriptase from a retrovirus or a retrotransposon.

[2511] Embodiment 435. The fusion protein of embodiment 425, wherein the fusion protein when complexed with a PEgRNA is capable of binding to a target DNA sequence.

[2512] Embodiment 436. The fusion protein of embodiment 435, wherein the target DNA sequence comprises a target strand and a complementary non-target strand.

[2513] Embodiment 437. The fusion protein of embodiment 435, wherein the binding of the fusion protein complexed to the PEgRNA forms an R-loop.

[2514] Embodiment 438. The fusion protein of embodiment 437, wherein the R-loop comprises (i) an RNA-DNA hybrid comprising the PEgRNA and the target strand, and (ii) the complementary non-target strand.

[2515] Embodiment 439. The fusion protein of embodiment 437, wherein the target or the complementary non-target strand is nicked to form a priming sequence having a free 3′ end.

[2516] Embodiment 440. The fusion protein of embodiment 439, wherein the nick site is upstream of the PAM sequence on the target strand.

[2517] Embodiment 441. The fusion protein of embodiment 439, wherein the nick site is upstream of the PAM sequence on the non-target strand.

[2518] Embodiment 442. The fusion protein of embodiment 439, wherein the nick site −1, −2, −3, −4, −5, −6, −7, −8, or −9 relative to the 5′ end of the PAM sequence.

[2519] Embodiment 443. The fusion protein of embodiment 426, wherein the PEgRNA comprises a guide RNA and at least one nucleic acid extension arm.

[2520] Embodiment 444. The fusion protein of embodiment 443, wherein the extension arm is at the 5′ or the 3′ end of the guide RNA, or at an intramolecular location in the guide RNA.

[2521] Embodiment 445. The fusion protein of embodiment 443, wherein the extension arm comprises (i) a DNA synthesis template sequence comprising a desired nucleotide change, and (ii) a primer binding site.

[2522] Embodiment 446. The fusion protein of embodiment 445, wherein the DNA synthesis template sequence encodes a single-strand DNA flap that is complementary to an endogenous DNA sequence adjacent to the nick site, wherein the single-strand DNA flap comprises the desired nucleotide change.

[2523] Embodiment 447. The fusion protein of embodiment 443, wherein the extension arm is at least 5 nucleotides, at least 6 nucleotides, at least 7 nucleotides, at least 8 nucleotides, at least 9 nucleotides, at least 10 nucleotides, at least 11 nucleotides, at least 12 nucleotides, at least 13 nucleotides, at least 14 nucleotides, at least 15 nucleotides, at least 16 nucleotides, at least 17 nucleotides, at least 18 nucleotides, at least 19 nucleotides, at least 20 nucleotides, at least 21 nucleotides, at least 22 nucleotides, at least 23 nucleotides, at least 24 nucleotides, at least 25 nucleotides, at least 26 nucleotides, at least 27 nucleotides, at least 28 nucleotides, at least 29 nucleotides, at least 30 nucleotides, at least 31 nucleotides, at least 32 nucleotides, at least 33 nucleotides, at least 34 nucleotides, at least 35 nucleotides, at least 36 nucleotides, at least 37 nucleotides, at least 38 nucleotides, at least 39 nucleotides, at least 40 nucleotides, at least 41 nucleotides, at least 42 nucleotides, at least 43 nucleotides, at least 44 nucleotides, at least 45 nucleotides, at least 46 nucleotides, at least 47 nucleotides, at least 48 nucleotides, at least 49 nucleotides, or at least 50 nucleotides.

[2524] Embodiment 448. The fusion protein of embodiment 443, wherein the single-strand DNA flap hybridizes to the endogenous DNA sequence adjacent to the nick site, thereby installing the desired nucleotide change in the target strand.

[2525] Embodiment 449. The fusion protein of embodiment 443, wherein the single-stranded DNA flap displaces the endogenous DNA sequence adjacent to the nick site and which has a free 5′ end.

[2526] Embodiment 450. The fusion protein of embodiment 446, wherein the endogenous DNA sequence having the 5′ end is excised by the cell.

[2527] Embodiment 451. The fusion protein of embodiment 446, wherein the endogenous DNA sequence having the 5′ end is excised by a flap endonuclease.

[2528] Embodiment 452. The fusion protein of embodiment 448, wherein cellular repair of the single-strand DNA flap incorporates the desired nucleotide change in the non-target strand, thereby forming a desired product.

[2529] Embodiment 453. The fusion protein of embodiment 449, wherein the desired nucleotide change is installed in an editing window that is between about −4 to +10 of the PAM sequence, or between about −10 to +20 of the PAM sequence, or between about −20 to +40 of the PAM sequence, or between about −30 to +100 of the PAM sequence.

[2530] Embodiment 454. The fusion protein of embodiment 449, wherein the desired nucleotide change is installed at least 1, 2, 3, 4, 5, 6, 7, 8, 9, 10, 11, 12, 13, 14, 15, 16, 17, 18, 19, 20, 21, 22, 23, 24, 25, 26, 27, 28, 29, 30, 31, 32, 33, 34, 35, 36, 37, 38, 39, 40, 41, 42, 43, 44, 45, 46, 47, 48, 49, 50, 51, 52, 53, 54, 55, 56, 57, 58, 59, 60, 61, 62, 63, 64, 65, 66, 67, 68, 69, 70, 71, 72, 73, 74, 75, 76, 77, 78, 79, 80, 81, 82, 83, 84, 85, 86, 87, 88, 89, 90, 91, 92, 93, 94, 95, 96, 97, 98, 99, or 100 nucleotides downstream of the nick site.

[2531] Embodiment 455. The fusion protein of embodiment 425, wherein the napDNAbp comprises an amino acid sequence of SEQ ID NO:18, or an amino acid sequence having at least 80%, 85%, 90%, 95%, 98%, or 99% sequence identity with the amino acid sequence to SEQ ID NO: 18.

[2532] Embodiment 456. The fusion protein of embodiment 425, wherein the napDNAbp comprises an amino acid sequence having at least 80%, 85%, 90%, 95%, 98%, or 99% sequence identity with the amino acid sequence of any one of SEQ ID NOs: 18-88, 126, 130, 137, 141, 147, 153, 157, 445, 460, 467, and 482-487.

[2533] Embodiment 457. The fusion protein of any one of the previous embodiments, wherein the fusion protein comprises the structure NH₂-[napDNAbp]-[domain comprising an RNA-dependent DNA polymerase activity]-COOH; or NH₂-[domain comprising an RNA-dependent DNA polymerase activity]-[napDNAbp]-COOH, wherein each instance of “]-[” indicates the presence of an optional linker sequence.

[2534] Embodiment 458. The fusion protein of embodiment 457, wherein the linker sequence comprises an amino acid sequence of SEQ ID NOs: 127, 165-176, 446, 453, and 767-769.

[2535] Embodiment 459. The fusion protein of embodiment 425, wherein the desired nucleotide change is a single nucleotide change, an insertion of one or more nucleotides, or a deletion of one or more nucleotides.

[2536] Embodiment 460. The fusion protein of embodiment 459, wherein the insert or deletion is at least 1, at least 2, at least 3, at least 4, at least 5, at least 6, at least 7, at least 8, at least 9, at least 10, at least 11, at least 12, at least 13, at least 14, at least 15, at least 16, at least 17, at least 18, at least 19, at least 20, at least 21, at least 22, at least 23, at least 24, at least 25, at least 26, at least 27, at least 28, at least 29, at least 30, at least 31, at least 32, at least 33, at least 34, at least 35, at least 36, at least 37, at least 38, at least 39, at least 40, at least 41, at least 42, at least 43, at least 44, at least 45, at least 46, at least 47, at least 48, at least 49, or at least 50.

[2537] Embodiment 461. A complex comprising a fusion protein of any of embodiments 425-460 and a PEgRNA, wherein the PEgRNA directs the fusion protein to a target DNA sequence for prime editing.

[2538] Embodiment 462. The complex of embodiment 461, wherein the PEgRNA comprises a guide RNA and a nucleic acid extension arm at the 3′ or 5′ end of the guide RNA or at an intramolecular position in the guide RNA.

[2539] Embodiment 463. The complex of embodiment 462, wherein the PEgRNA is capable of binding to a napDNAbp and directing the napDNAbp to the target DNA sequence.

[2540] Embodiment 464. The complex of embodiment 463, wherein the target DNA sequence comprises a target strand and a complementary non-target strand, wherein the guide RNA hybridizes to the target strand to form an RNA-DNA hybrid and an R-loop.

[2541] Embodiment 465. The complex of embodiment 464, wherein the at least one nucleic acid extension arm comprises (i) a DNA synthesis template, and (ii) a primer binding site.

[2542] Embodiment 466. The complex of embodiment 464, wherein the PEgRNA comprises the nucleotide sequence of SEQ ID NOs: 101-104, 181-183, 223-244, 277, 325-334, 336, 338, 340, 342, 344, 346, 348, 350, 352, 354, 356, 358, 360, 362, 364, 366, 368, 499-505, 735-761, 776-777, or a nucleotide sequence having at least 85%, or at least 90%, or at least 95%, or at least 98%, or at least 99% sequence identity with any one of SEQ ID NOs: 101-104, 181-183, 223-244, 277, 325-334, 336, 338, 340, 342, 344, 346, 348, 350, 352, 354, 356, 358, 360, 362, 364, 366, 368, 499-505, 735-761, 776-777.

[2543] Embodiment 467. The complex of embodiment 465, wherein the DNA synthesis template comprises a nucleotide sequence that is at least 80%, or 85%, or 90%, or 95%, or 99% identical to the endogenous DNA target.

[2544] Embodiment 468. The complex of embodiment 465, wherein the primer binding site hybridizes with a free 3′ end of the cut DNA.

[2545] Embodiment 469. The complex of embodiment 461, wherein the napDNAbp is a Cas9 nickase.

[2546] Embodiment 470. The complex of embodiment 461, wherein the napDNAbp comprises an amino acid sequence of SEQ ID NO: 18, or an amino acid sequence having at least 80%, 85%, 90%, 95%, 98%, or 99% sequence identity with SEQ ID NO: 18.

[2547] Embodiment 471. The complex of embodiment 461, wherein the napDNAbp comprises an amino acid sequence having at least 80%, 85%, 90%, 95%, 98%, or 99% sequence identity with the amino acid sequence of any one of SEQ ID NOs: 18-88, 126, 130, 137, 141, 147, 153, 157, 445, 460, 467, and 482-487.

[2548] Embodiment 472. The complex of embodiment 461, wherein the PEgRNA comprises a guide RNA and a nucleic acid extension arm at the 3′ or 5′ end of the guide RNA, or at an intramolecular position in the guide RNA.

[2549] Embodiment 473. The complex of embodiment 465, wherein the DNA synthesis template comprises a nucleotide sequence that is at least 80%, or 85%, or 90%, or 95%, or 99% identical to the endogenous DNA target.

[2550] Embodiment 474. The complex of embodiment 465, wherein the primer binding site hybridizes with a free 3′ end of the cut DNA.

[2551] Embodiment 475. The complex of embodiment 462, wherein the PEgRNA further comprises at least one additional structure selected from the group consisting of a linker, a stem loop, a hairpin, a toeloop, an aptamer, or an RNA-protein recruitment domain.

[2552] Embodiment 476. A polynucleotide encoding the fusion protein of any of embodiments 425-461.

[2553] Embodiment 477. A polynucleotide encoding the PEgRNA of any of the above embodiments.

[2554] Embodiment 478. A vector comprising the polynucleotide of embodiment 476, wherein expression of the fusion protein is under the control of a promoter.

[2555] Embodiment 479. A vector comprising the polynucleotide of embodiment 477, wherein expression of the PEgRNA is under the control of a promoter.

[2556] Embodiment 480. The vector of embodiment 479, wherein the promoter is a U6 promoter.

[2557] Embodiment 481. The vector of embodiment 479, wherein the promoter is a CMV promoter.

[2558] Embodiment 482. The vector of embodiment 480, wherein the PEgRNA is engineered to remove one or more repeating clusters of Ts in the extension arm to improve transcription efficiency by the U6 promoter.

[2559] Embodiment 483. The vector of embodiment 482, wherein the one or more repeating clusters of Ts that is removed comprises at least 3 Ts, at least 4 Ts, at least 5 Ts, at least 6 Ts, at least 7 Ts, at least 8 Ts, at least 9 Ts, at least 10 Ts, at least 11 Ts, at least 12 Ts, at least 13 Ts, at least 14 Ts, at least 15 Ts, at least 16 Ts, at least 17 Ts, at least 18 Ts, at least 19 Ts, or at least 20 Ts.

[2560] Embodiment 484. A cell comprising the fusion protein of any of embodiments 425-460 and an PEgRNA bound to the napDNAbp of the fusion protein.

[2561] Embodiment 485. A cell comprising a complex of any one of embodiments 461-475.

[2562] Embodiment 486. A pharmaceutical composition comprising: (i) a fusion protein of any of embodiments 425-460, the complex of embodiments 461-475, the polynucleotide of embodiments 476-477, or the vector of embodiments 478-483; and (ii) a pharmaceutically acceptable excipient.

[2563] Embodiment 487. A pharmaceutical composition comprising: (i) the complex of embodiments 461-475 (ii) a polymerase provided in trans; and (iii) a pharmaceutically acceptable excipient.

[2564] Embodiment 488. A kit for prime editing comprising: (i) a nucleic acid molecule encoding the fusion protein of any one of embodiments 425-460; and (ii) a nucleic acid molecule encoding a PEgRNA that is capable of directing the fusion protein to a target DNA site, wherein the nucleic acid molecule of (i) and (ii) may be contained within a single DNA construct or separate DNA constructs.

[2565] Embodiment 489. The kit of embodiment 488, wherein the nucleic acid molecule of (i) further comprising a promoter that drives expression of the fusion protein.

[2566] Embodiment 490. The kit of embodiment 488, wherein the nucleic acid molecule of (ii) further comprises a promoter that drives expression of the PEgRNA.

[2567] Embodiment 491. The kit of embodiment 490, wherein the promoter is a U6 promoter.

[2568] Embodiment 492. The kit of embodiment 490, wherein the promoter is a CMV promoter.

[2569] Embodiment 493. The fusion protein of embodiment 457, wherein the linker sequence comprises an amino acid sequence of SEQ ID NOs: 174 (1× SGGS), 446 (2× SGGS), 3889 (3× SGGS), 171 (1× XTEN), 3968 (1× EAAAK), 3969 (2× EAAAK), and 3970 (3× EAAAK).

### Group B. PE Guides and Methods of Design

[2570] Embodiment 1. A PEgRNA comprising a guide RNA and at least one nucleic acid extension arm comprising a DNA synthesis template.

[2571] Embodiment 2. The PEgRNA of embodiment 1, wherein the nucleic acid extension arm is position at the 3′ or 5′ end of the guide RNA, or at an intramolecular position in the guide RNA, and wherein the nucleic acid extension arm is DNA or RNA.

[2572] Embodiment 3. The PEgRNA of embodiment 1, wherein the PEgRNA is capable of binding to a napDNAbp and directing the napDNAbp to a target DNA sequence.

[2573] Embodiment 4. The PEgRNA of embodiment 3, wherein the target DNA sequence comprises a target strand and a complementary non-target strand.

[2574] Embodiment 5. The PEgRNA of embodiment 3, wherein the guide RNA hybridizes to the target strand to form an RNA-DNA hybrid and an R-loop.

[2575] Embodiment 6. The PEgRNA of embodiment 1, wherein the at least one nucleic acid extension arm further comprises a primer binding site.

[2576] Embodiment 7. The PEgRNA of embodiment 1, wherein the nucleic acid extension arm is at least 5 nucleotides, at least 6 nucleotides, at least 7 nucleotides, at least 8 nucleotides, at least 9 nucleotides, at least 10 nucleotides, at least 11 nucleotides, at least 12 nucleotides, at least 13 nucleotides, at least 14 nucleotides, at least 15 nucleotides, at least 16 nucleotides, at least 17 nucleotides, at least 18 nucleotides, at least 19 nucleotides, at least 20 nucleotides, at least 21 nucleotides, at least 22 nucleotides, at least 23 nucleotides, at least 24 nucleotides, at least 25 nucleotides, at least 26 nucleotides, at least 27 nucleotides, at least 28 nucleotides, at least 29 nucleotides, at least 30 nucleotides, at least 31 nucleotides, at least 32 nucleotides, at least 33 nucleotides, at least 34 nucleotides, at least 35 nucleotides, at least 36 nucleotides, at least 37 nucleotides, at least 38 nucleotides, at least 39 nucleotides, at least 40 nucleotides, at least 41 nucleotides, at least 42 nucleotides, at least 43 nucleotides, at least 44 nucleotides, at least 45 nucleotides, at least 46 nucleotides, at least 47 nucleotides, at least 48 nucleotides, at least 49 nucleotides, or at least 50 nucleotides.

[2577] Embodiment 8. The PEgRNA of embodiment 1, wherein the DNA synthesis template is at least 3 nucleotides, at least 4 nucleotides, at least 5 nucleotides, at least 6 nucleotides, at least 7 nucleotides, at least 8 nucleotides, at least 9 nucleotides, at least 10 nucleotides, at least 11 nucleotides, at least 12 nucleotides, at least 13 nucleotides, at least 14 nucleotides, or at least 15 nucleotides in length.

[2578] Embodiment 9. The PEgRNA of embodiment 6, wherein the primer binding site is at least 3 nucleotides, at least 4 nucleotides, at least 5 nucleotides, at least 6 nucleotides, at least 7 nucleotides, at least 8 nucleotides, at least 9 nucleotides, at least 10 nucleotides, at least 11 nucleotides, at least 12 nucleotides, at least 13 nucleotides, at least 14 nucleotides, or at least 15 nucleotides in length.

[2579] Embodiment 10. The PEgRNA of embodiment 1, further comprising at least one additional structure selected from the group consisting of a tRNA, linker, a stem loop, a hairpin, a toeloop, an aptamer, or an RNA-protein recruitment domain.

[2580] Embodiment 11. The PEgRNA of embodiment 1, wherein the DNA synthesis template encodes a single-strand DNA flap that is complementary to an endogenous DNA sequence adjacent to a nick site, wherein the single-strand DNA flap comprises a desired nucleotide change.

[2581] Embodiment 12. The PEgRNA of embodiment 11, wherein the single-stranded DNA flap displaces an endogenous single-strand DNA having a 5′ end in the target DNA sequence that has been nicked, and wherein the endogenous single-strand DNA is immediately adjacent downstream of the nick site.

[2582] Embodiment 13. The PEgRNA of embodiment 11, wherein the endogenous single-stranded DNA having the free 5′ end is excised by the cell.

[2583] Embodiment 14. The PEgRNA of embodiment 13, wherein cellular repair of the single-strand DNA flap results in installation of the desired nucleotide change, thereby forming a desired product.

[2584] Embodiment 15. The PEgRNA of embodiment 1, comprising the nucleotide sequence of SEQ ID NOs: 101-104, 181-183, 223-244, 277, 325-334, 336, 338, 340, 342, 344, 346, 348, 350, 352, 354, 356, 358, 360, 362, 364, 366, 368, 499-505, 735-761, 776-777, or a nucleotide sequence having at least 85%, or at least 90%, or at least 95%, or at least 98%, or at least 99% sequence identity with any one of SEQ ID NOs: 101-104, 181-183, 223-244, 277, 325-334, 336, 338, 340, 342, 344, 346, 348, 350, 352, 354, 356, 358, 360, 362, 364, 366, 368, 499-505, 735-761, 776-777.

[2585] Embodiment 16. The PEgRNA of embodiment 1, wherein the DNA synthesis template comprises a nucleotide sequence that is at least 80%, or 85%, or 90%, or 95%, or 99% identical to the endogenous DNA target.

[2586] Embodiment 17. The PEgRNA of embodiment 6, wherein the primer binding site hybridizes with a free 3′ end of the cut DNA.

[2587] Embodiment 18. The PEgRNA of embodiment 10, wherein the at least one additional structure is located at the 3′ or 5′ end of the PEgRNA.

[2588] Embodiment 19. The PEgRNA of embodiment 10, wherein the linker comprises a nucleotide sequence selected from the group consisting of SEQ ID NOs: 127, 165-176, 446, 453, and 767-769.

[2589] Embodiment 20. The PEgRNA of embodiment 10, wherein the stem loop comprises a nucleotide sequence selected from the stem loops described herein.

[2590] Embodiment 21. The PEgRNA of embodiment 10, wherein the hairpin comprises a nucleotide sequence selected from the hairpins described herein.

[2591] Embodiment 22. The PEgRNA of embodiment 10, wherein the toeloop comprises a nucleotide sequence selected from the toeloops described herein.

[2592] Embodiment 23. The PEgRNA of embodiment 10, wherein the aptamer comprises a nucleotide sequence selected from the aptamers described herein.

[2593] Embodiment 24. The PEgRNA of embodiment 10, wherein the RNA-protein recruitment domain comprises a nucleotide sequence selected from the RNA-protein recruitment domain described herein.

[2594] Embodiment 25. A method for designing a PEgRNA for use in prime editing to install a desired nucleotide change in a target nucleotide sequence, wherein said PEgRNA comprises a spacer, gRNA core, and an extension arm, and wherein said extension arm comprises a primer binding site and a DNA synthesis template, said method comprising:
[2595] (i) selecting a desired target edit site in a target nucleotide sequence;
[2596] (ii) obtaining a context nucleotide sequence upstream and downstream from the target edit site;
[2597] (iii) locating putative protospacer adjacent motif (PAM) sites in the context nucleotide sequence which are proximal to the desired target edit site;
[2598] (iv) identifying the corresponding nick sites for each putative PAM site;
[2599] (v) designing the spacer;
[2600] (vi) designing the gRNA core;
[2601] (vii) designing the extension arm; and
[2602] (viii) constructing the full PEgRNA by concatenating the spacer, gRNA core, and the extension arm.

[2603] Embodiment 26. The method of embodiment 25, wherein the step (i) of selecting the desired target edit site comprises selecting a disease-causing mutation.

[2604] Embodiment 27. The method of embodiment 26, wherein the disease-causing mutation is associated with a disease selected from the group consisting of: cancer, autoimmune disorders, neurological disorders, skin disorders, respiratory diseases, and cardiac diseases.

[2605] Embodiment 28. The method of embodiment 25, wherein the step (ii) of obtaining a context nucleotide sequence upstream and downstream from the target edit site comprises obtaining about 50-55 base pairs (bp), about 55-60 bp, about 60-65 bp, about 65-70 bp, about 70-75 bp, about 75-80 bp, about 80-85 bp, about 85-90 bp, about 90-95 bp, about 95-100 bp, about 100-105 bp, about 105-110 bp, about 110-125 bp, about 125-130 bp, about 130-135 bp, about 135-140 bp, about 140-145 bp, about 145-150 bp, about 150-155 bp, about 155-160 bp, about 160-165 bp, about 165-170 bp, about 170-175 bp, about 175-180 bp, about 180-185 bp, about 185-190 bp, about 190-195 bp, about 195-200 bp, about 200-205 bp, about 205-210 bp, about 210-215 bp, about 215-220 bp, about 220-225 bp, about 225-230 bp, about 230-235 bp, about 235-240 bp, about 240-245 bp, or about 245-250 bp of a region that comprises the desired target edit site.

[2606] Embodiment 29. The method of embodiment 28, wherein the desired target edit site is positioned approximately equidistant from each end of the context nucleotide sequence.

[2607] Embodiment 30. The method of embodiment 25, wherein in step (iii), the putative PAM sites are proximal to the desired target edit site.

[2608] Embodiment 31. The method of embodiment 25, wherein in step (iii), the putative PAM sites comprise those with associated nick sites located at a position less than 30 nucleotides from the target edit site, or less than 29, 28, 27, 26, 25, 24, 23, 22, 21, 20, 19, 18, 17, 16, 15, 14, 13, 12, 11, 10, 9, 8, 7, 6, 5, 4, 3, or 2 nucleotides from the target edit site.

[2609] Embodiment 32. The method of embodiment 25, wherein in step (iii), the putative PAM sites comprise those with associated nick sites located at a position more than 30 nucleotides from the target edit site, or more than 31, 32, 33, 34, 35, 36, 37, 38, 39, 40, 41, 42, 43, 44, 45, 46, 47, 48, 49, 50, 51, 52, 53, 54, 55, 56, 57, 58, 59, 60, 61, 62, 63, 64, 65, 66, 67, 68, 69, 70, 71, 72, 73, 74, 75, 76, 77, 78, 79, 80, 81, 82, 83, 84,85, 86, 87, 88, 89, 90, 91, 92, 93, 94, 95, 96, 97, 98, 99, or 100 nucleotides from the target edit site.

[2610] Embodiment 33. The method of embodiment 25, wherein in step (iii), the putative PAM sites are associated with one or corresponding napDNAbp which bind to said PAM sites.

[2611] Embodiment 34. The method of embodiment 33, the putative PAM sites and their corresponding napDNAbps are selected from any of the following groupings: (a) SpCas9 of SEQ ID NO: 18-25 and 87-88 and NGG; (b) Sp VQR nCas9; and (c) NGAN.

[2612] Embodiment 35. The method of embodiment 25, wherein the step (v) of designing the spacer comprises determining the complement nucleotide sequence of the protospacer sequence associated with each putative PAM.

[2613] Embodiment 36. The method of embodiment 25, wherein the step (vi) of designing gRNA core comprises in the context of each putative PAM, selecting a gRNA core sequence that is capable of binding to a napDNAbp which is associated with each of said putative PAMs.

[2614] Embodiment 37. The method of embodiment 25, wherein the step (vii) of designing the extension arm comprises designing (a) a DNA synthesis template comprising the edit of interest, and (b) a primer binding site.

[2615] Embodiment 38. The method of embodiment 37, wherein designing the primer binding site comprises (a) identifying a DNA primer on the PAM-containing strand of the target nucleotide sequence, wherein the 3′ end of the DNA primer is the first nucleotide upstream of the nick site associated with the PAM site, and (b) designing the complement of the DNA primer, wherein said complement forms the the primer binding site.

[2616] Embodiment 39. The method of embodiment 38, wherein the primer binding site is 8 to 15 nucleotides in length.

[2617] Embodiment 40. The method of embodiment 38, wherein the primer binding site is 12-13 nucleotides if the DNA primer contains about 40-60% GC content.

[2618] Embodiment 41. The method of embodiment 38, wherein the primer binding site is 14-15 nucleotides if the DNA primer contains less than about 40% GC content.

[2619] Embodiment 42. The method of embodiment 38, wherein the primer binding site is 8-11 nucleotides if the DNA primer contains greater than about 60% GC content.

[2620] Embodiment 43. A method of prime editing comprising contacting a target DNA sequence with a PEgRNA of any of embodiments 1-24 and a prime editor fusion protein comprising a napDNAbp and a domain having an RNA-dependent DNA polymerase activity.

[2621] Embodiment 44. The method of embodiment 43, wherein the napDNAbp has a nickase activity.

[2622] Embodiment 45. The method of embodiment 43, wherein the napDNAbp is a Cas9 protein or variant thereof.

[2623] Embodiment 46. The method of embodiment 43, wherein the napDNAbp is a nuclease active Cas9, a nuclease inactive Cas9 (dCas9), or a Cas9 nickase (nCas9).

[2624] Embodiment 47. The method of embodiment 43, wherein the napDNAbp is Cas9 nickase (nCas9).

[2625] Embodiment 48. The method of embodiment 43, wherein the napDNAbp is selected from the group consisting of: Cas9, Cas12e, Cas12d, Cas12a, Cas12b1, Cas13a, Cas12c, and Argonaute and optionally has a nickase activity.

[2626] Embodiment 49. The method of embodiment 43, wherein the domain comprising an RNA-dependent DNA polymerase activity is a reverse transcriptase comprising any one of the amino acid sequences of SEQ ID NOs: 89-100, 105-122, 128-129, 132, 139, 143, 149, 154, 159, 235, 454, 471, 516, 662, 700, 701-716, 739-741, and 766.

[2627] Embodiment 50. The method of embodiment 43, wherein the domain comprising an RNA-dependent DNA polymerase activity is a reverse transcriptase comprising an amino acid sequence having at least 80%, 85%, 90%, 95%, 98%, or 99% sequence identity with the amino acid sequence of any one of SEQ ID NOs: 89-100, 105-122, 128-129, 132, 139, 143, 149, 154, 159, 235, 454, 471, 516, 662, 700, 701-716, 739-741, and 766.

[2628] Embodiment 51. The method of embodiment 43, wherein the domain comprising an RNA-dependent DNA polymerase activity is a naturally-occurring reverse transcriptase from a retrovirus or a retrotransposon.

### Group C. PE Complexes

[2629] Embodiment 1. A complex for prime editing comprising:

[2630] (i) fusion protein comprising a nucleic acid programmable DNA binding protein (napDNAbp) and a domain comprising an RNA-dependent DNA polymerase activity; and

[2631] (ii) a prime editing guide RNA (PEgRNA).

[2632] Embodiment 2. The complex of embodiment 1, wherein the fusion protein is capable of carrying out prime editing in the presence of the prime editing guide RNA (PEgRNA) to install a desired nucleotide change in a target sequence.

[2633] Embodiment 3. The complex of embodiment 11, wherein the napDNAbp has a nickase activity.

[2634] Embodiment 4. The complex of embodiment 1, wherein the napDNAbp is a Cas9 protein or variant thereof.

[2635] Embodiment 5. The complex of embodiment 1, wherein the napDNAbp is a nuclease active Cas9, a nuclease inactive Cas9 (dCas9), or a Cas9 nickase (nCas9).

[2636] Embodiment 6. The complex of embodiment 1, wherein the napDNAbp is Cas9 nickase (nCas9).

[2637] Embodiment 7. The complex of embodiment 1, wherein the napDNAbp is selected from the group consisting of: Cas9, Cas12e, Cas12d, Cas12a, Cas12b1, Cas13a, Cas12c, and Argonaute and optionally has a nickase activity.

[2638] Embodiment 8. The complex of embodiment 1, wherein the domain comprising an RNA-dependent DNA polymerase activity is a reverse transcriptase comprising any one of the amino acid sequences of SEQ ID NOs: 89-100, 105-122, 128-129, 132, 139, 143, 149, 154, 159, 235, 454, 471, 516, 662, 700, 701-716, 739-741, and 766.

[2639] Embodiment 9. The complex of embodiment 1, wherein the domain comprising an RNA-dependent DNA polymerase activity is a reverse transcriptase comprising an amino acid sequence having at least 80%, 85%, 90%, 95%, 98%, or 99% sequence identity with the amino acid sequence of any one of SEQ ID NOs: 89-100, 105-122, 128-129, 132, 139, 143, 149, 154, 159, 235, 454, 471, 516, 662, 700, 701-716, 739-741, and 766.

[2640] Embodiment 10. The complex of embodiment 1, wherein the domain comprising an RNA-dependent DNA polymerase activity is a naturally-occurring reverse transcriptase from a retrovirus or a retrotransposon.

[2641] Embodiment 11. The complex of embodiment 1, wherein the fusion protein when complexed with a PEgRNA is capable of binding to a target DNA sequence.

[2642] Embodiment 12. The complex of embodiment 1, wherein the PEgRNA comprises a guide RNA and at least one nucleic acid extension arm comprising a DNA synthesis template.

[2643] Embodiment 13. The complex of embodiment 12, wherein the nucleic acid extension arm is position at the 3′ or 5′ end of the guide RNA, or at an intramolecular position in the guide RNA, and wherein the nucleic acid extension arm is DNA or RNA.

[2644] Embodiment 14. The complex of embodiment 12, wherein the PEgRNA is capable of binding to a napDNAbp and directing the napDNAbp to a target DNA sequence.

[2645] Embodiment 15. The complex of embodiment 14, wherein the target DNA sequence comprises a target strand and a complementary non-target strand.

[2646] Embodiment 16. The complex of embodiment 12, wherein the guide RNA hybridizes to the target strand to form an RNA-DNA hybrid and an R-loop.

[2647] Embodiment 17. The complex of embodiment 12, wherein the at least one nucleic acid extension arm further comprises a primer binding site.

[2648] Embodiment 18. The complex of embodiment 12, wherein the nucleic acid extension arm is at least 5 nucleotides, at least 6 nucleotides, at least 7 nucleotides, at least 8 nucleotides, at least 9 nucleotides, at least 10 nucleotides, at least 11 nucleotides, at least 12 nucleotides, at least 13 nucleotides, at least 14 nucleotides, at least 15 nucleotides, at least 16 nucleotides, at least 17 nucleotides, at least 18 nucleotides, at least 19 nucleotides, at least 20 nucleotides, at least 21 nucleotides, at least 22 nucleotides, at least 23 nucleotides, at least 24 nucleotides, at least 25 nucleotides, at least 26 nucleotides, at least 27 nucleotides, at least 28 nucleotides, at least 29 nucleotides, at least 30 nucleotides, at least 31 nucleotides, at least 32 nucleotides, at least 33 nucleotides, at least 34 nucleotides, at least 35 nucleotides, at least 36 nucleotides, at least 37 nucleotides, at least 38 nucleotides, at least 39 nucleotides, at least 40 nucleotides, at least 41 nucleotides, at least 42 nucleotides, at least 43 nucleotides, at least 44 nucleotides, at least 45 nucleotides, at least 46 nucleotides, at least 47 nucleotides, at least 48 nucleotides, at least 49 nucleotides, or at least 50 nucleotides.

[2649] Embodiment 19. The complex of embodiment 12, wherein the DNA synthesis template is at least 3 nucleotides, at least 4 nucleotides, at least 5 nucleotides, at least 6 nucleotides, at least 7 nucleotides, at least 8 nucleotides, at least 9 nucleotides, at least 10 nucleotides, at least 11 nucleotides, at least 12 nucleotides, at least 13 nucleotides, at least 14 nucleotides, or at least 15 nucleotides in length.

[2650] Embodiment 20. The complex of embodiment 17, wherein the primer binding site is at least 3 nucleotides, at least 4 nucleotides, at least 5 nucleotides, at least 6 nucleotides, at least 7 nucleotides, at least 8 nucleotides, at least 9 nucleotides, at least 10 nucleotides, at least 11 nucleotides, at least 12 nucleotides, at least 13 nucleotides, at least 14 nucleotides, or at least 15 nucleotides in length.

[2651] Embodiment 21. The complex of embodiment 12, wherein the PEgRNA further comprises at least one additional structure selected from the group consisting of a linker, a stem loop, a hairpin, a toeloop, an aptamer, or an RNA-protein recruitment domain.

[2652] Embodiment 22. The complex of embodiment 12, wherein the DNA synthesis template encodes a single-strand DNA flap that is complementary to an endogenous DNA sequence adjacent to a nick site, wherein the single-strand DNA flap comprises a desired nucleotide change.

[2653] Embodiment 23. The complex of embodiment 22, wherein the single-stranded DNA flap displaces an endogenous single-strand DNA having a 5′ end in the target DNA sequence that has been nicked, and wherein the endogenous single-strand DNA is immediately adjacent downstream of the nick site.

[2654] Embodiment 24. The complex of embodiment 23, wherein the endogenous single-stranded DNA having the free 5′ end is excised by the cell.

[2655] Embodiment 25. The complex of embodiment 23, wherein cellular repair of the single-strand DNA flap results in installation of the desired nucleotide change, thereby forming a desired product.

[2656] Embodiment 26. The complex of embodiment 12, wherein the PEgRNA comprises the nucleotide sequence of SEQ ID NOs: 101-104, 181-183, 223-244, 277, 325-334, 336, 338, 340, 342, 344, 346, 348, 350, 352, 354, 356, 358, 360, 362, 364, 366, 368, 499-505, 735-761, 776-777, or a nucleotide sequence having at least 85%, or at least 90%, or at least 95%, or at least 98%, or at least 99% sequence identity with any one of SEQ ID NOs: 101-104, 181-183, 223-244, 277, 325-334, 336, 338, 340, 342, 344, 346, 348, 350, 352, 354, 356, 358, 360, 362, 364, 366, 368, 499-505, 735-761, 776-777.

[2657] Embodiment 27. The complex of embodiment 12, wherein the DNA synthesis template comprises a nucleotide sequence that is at least 80%, or 85%, or 90%, or 95%, or 99% identical to the endogenous DNA target.

[2658] Embodiment 28. The complex of embodiment 17, wherein the primer binding site hybridizes with a free 3′ end of the cut DNA.

[2659] Embodiment 29. The complex of embodiment 21, wherein the at least one additional structure is located at the 3′ or 5′ end of the PEgRNA.

[2660] Embodiment 30. The complex of embodiment 29, wherein the linker comprises a nucleotide sequence selected from the group consisting of SEQ ID NOs: 127, 165-176, 446, 453, and 767-769.

[2661] Embodiment 31. The complex of embodiment 29, wherein the stem loop comprises a nucleotide sequence selected from the stem loops described herein.

[2662] Embodiment 32. The complex of embodiment 29, wherein the hairpin comprises a nucleotide sequence selected from the hairpins described herein.

[2663] Embodiment 33. The complex of embodiment 29, wherein the toeloop comprises a nucleotide sequence selected from the toeloops described herein.

[2664] Embodiment 34. The complex of embodiment 29, wherein the aptamer comprises a nucleotide sequence selected from the aptamers described herein.

[2665] Embodiment 35. The complex of embodiment 29, wherein the RNA-protein recruitment domain comprises a nucleotide sequence selected from the RNA-protein recruitment domains described herein.

[2666] Embodiment 36. The complex of embodiment 1, wherein the target DNA sequence comprises a target strand and a complementary non-target strand.

[2667] Embodiment 37. The complex of embodiment 36, wherein the R-loop comprises
[2668] (i) an RNA-DNA hybrid comprising the PEgRNA and the target strand, and (ii) the complementary non-target strand.

[2669] Embodiment 38. The complex of embodiment 37, wherein the target or the complementary non-target strand is nicked to form a priming sequence having a free 3′ end.

[2670] Embodiment 39. The complex of embodiment 38, wherein the nick site is upstream of the PAM sequence on the target strand.

[2671] Embodiment 40. The complex of embodiment 38, wherein the nick site is upstream of the PAM sequence on the non-target strand.

[2672] Embodiment 41. The complex of embodiment 38, wherein the nick site −1, −2, −3, −4, −5, −6, −7, −8, or −9 relative to the 5′ end of the PAM sequence.

[2673] Embodiment 42. The complex of embodiment 22, wherein the single-strand DNA flap hybridizes to the endogenous DNA sequence adjacent to the nick site, thereby installing the desired nucleotide change in the target strand.

[2674] Embodiment 43. The complex of embodiment 22, wherein the single-stranded DNA flap displaces the endogenous DNA sequence adjacent to the nick site and which has a free 5′ end.

[2675] Embodiment 44. The complex of embodiment 22, wherein the endogenous DNA sequence having the 5′ end is excised by the cell.

[2676] Embodiment 45. The complex of embodiment 44, wherein the endogenous DNA sequence having the 5′ end is excised by a flap endonuclease.

[2677] Embodiment 46. The complex of embodiment 43, wherein cellular repair of the single-strand DNA flap incorporates the desired nucleotide change in the non-target strand, thereby forming a desired product.

[2678] Embodiment 47. The complex of embodiment 46, wherein the desired nucleotide change is installed in an editing window that is between about −4 to +10 of the PAM sequence, or between about −10 to +20 of the PAM sequence, or between about −20 to +40 of the PAM sequence, or between about −30 to +100 of the PAM sequence.

[2679] Embodiment 48. The complex of embodiment 47, wherein the desired nucleotide change is installed at least 1, 2, 3, 4, 5, 6, 7, 8, 9, 10, 11, 12, 13, 14, 15, 16, 17, 18, 19, 20, 21, 22, 23, 24, 25, 26, 27, 28, 29, 30, 31, 32, 33, 34, 35, 36, 37, 38, 39, 40, 41, 42, 43, 44, 45, 46, 47, 48, 49, 50, 51, 52, 53, 54, 55, 56, 57, 58, 59, 60, 61, 62, 63, 64, 65, 66, 67, 68, 69, 70, 71, 72, 73, 74, 75, 76, 77, 78, 79, 80, 81, 82, 83, 84, 85, 86, 87, 88, 89, 90, 91, 92, 93, 94, 95, 96, 97, 98, 99, or 100 nucleotides downstream of the nick site.

[2680] Embodiment 49. The complex of any one of the previous embodiments, wherein the fusion protein comprises the structure NH₂-[napDNAbp]-[domain comprising an RNA-dependent DNA polymerase activity]-COOH; or NH₂-[domain comprising an RNA-dependent DNA polymerase activity]-[napDNAbp]-COOH, wherein each instance of “]-[” indicates the presence of an optional linker sequence.

[2681] Embodiment 50. The complex of embodiment 49, wherein the linker sequence comprises an amino acid sequence of SEQ ID NOs: 127, 165-176, 446, 453, and 767-769.

[2682] Embodiment 51. The complex of embodiment 1, wherein the fusion protein further comprises a linker that joins the napDNAbp and the domain comprising an RNA-dependent DNA polymerase activity.

[2683] Embodiment 52. The complex of embodiment 51, wherein the linker sequence comprises an amino acid sequence of SEQ ID NOs. 174 (1× SGGS), 446 (2× SGGS), 3889 (3× SGGS), 171 (1× XTEN), 3968 (1× EAAAK), 3969 (2× EAAAK), and 3970 (3× EAAAK).

### Group D. PE Method for Correcting Mutations

[2684] Embodiment 1. A method for installing a desired nucleotide change in a double-stranded DNA sequence, the method comprising: contacting the double-stranded DNA sequence with a complex comprising a fusion protein and a PEgRNA, wherein the fusion protein comprises a napDNAbp and a polymerase, and wherein the PEgRNA comprises a DNA synthesis template comprising the desired nucleotide change and a primer binding site;

[2685] thereby nicking the double-stranded DNA sequence, thereby generating a free single-strand DNA having a 3′ end;

[2686] thereby hybridizing the 3′ end of the free single-strand DNA to the primer binding site, thereby priming the polymerase;

[2687] thereby polymerizing a strand of DNA from the 3′ end hybridized to the primer binding site, thereby generating a single-strand DNA flap comprising the desired nucleotide change and which is complementary to the DNA synthesis template;

[2688] thereby replacing an endogenous DNA strand adjacent the cut site with the single-strand DNA flap, thereby installing the desired nucleotide change in the double-stranded DNA sequence.

[2689] Embodiment 2. The method of embodiment 1, wherein replacing an endogenous DNA strand comprises: (i) hybridizing the single-strand DNA flap to the endogenous DNA strand adjacent the cut site to create a sequence mismatch; (ii) excising the endogenous DNA strand; and (iii) repairing the mismatch to form the desired product comprising the desired nucleotide change in both strands of DNA.

[2690] Embodiment 3. The method of embodiment 1, wherein the desired nucleotide change is a single nucleotide substitution, a deletion, or an insertion.

[2691] Embodiment 4. The method of embodiment 3, wherein the single nucleotide substitution is a transition or a transversion.

[2692] Embodiment 5. The method of embodiment 1, wherein the desired nucleotide change is (1) a G to T substitution, (2) a G to A substitution, (3) a G to C substitution, (4) a T to G substitution, (5) a T to A substitution, (6) a T to C substitution, (7) a C to G substitution, (8) a C to T substitution, (9) a C to A substitution, (10) an A to T substitution, (11) an A to G substitution, or (12) an A to C substitution.

[2693] Embodiment 6. The method of embodiment 1, wherein the desired nucleotide change converts (1) a G:C basepair to a T:A basepair, (2) a G:C basepair to an A:T basepair, (3) a G:C basepair to C:G basepair, (4) a T:A basepair to a G:C basepair, (5) a T:A basepair to an A:T basepair, (6) a T:A basepair to a C:G basepair, (7) a C:G basepair to a G:C basepair, (8) a C:G basepair to a T:A basepair, a C:G basepair to an A:T basepair, (10) an

[2694] A:T basepair to a T:A basepair, (11) an A:T basepair to a G:C basepair, or (12) an A:T basepair to a C:G basepair.

[2695] Embodiment 7. The method of embodiment 1, wherein the desired nucleotide change is an insertion or deletion of 1, 2, 3, 4, 5, 6, 7, 8, 9, 10, 11, 12, 13, 14, 15, 16, 17, 18, 19, 20, 21, 22, 23, 24, or 25 nucleotides.

[2696] Embodiment 8. The method of embodiment 1, wherein the desired nucleotide change corrects a disease-associated gene.

[2697] Embodiment 9. The method of embodiment 8, wherein the disease-associated gene is associated with a monogentic disorder selected from the group consisting of: Adenosine Deaminase (ADA) Deficiency; Alpha-1 Antitrypsin Deficiency; Cystic Fibrosis; Duchenne Muscular Dystrophy; Galactosemia; Hemochromatosis; Huntington's Disease; Maple Syrup Urine Disease; Marfan Syndrome; Neurofibromatosis Type 1; Pachyonychia Congenita; Phenylkeotnuria; Severe Combined Immunodeficiency; Sickle Cell Disease; Smith-Lemli-Opitz Syndrome; a trinucleotide repeat disorder; a prion disease; and Tay-Sachs Disease.

[2698] Embodiment 10. The method of embodiment 8, wherein the disease-associated gene is associated with a polygenic disorder selected from the group consisting of: heart disease; high blood pressure; Alzheimer's disease; arthritis; diabetes; cancer; and obesity.

[2699] Embodiment 11. The method of embodiment 1, wherein the napDNAbp is a nuclease dead Cas9 (dCas9), a Cas9 nickase (nCas9), or a nuclease active Cas9.

[2700] Embodiment 12. The method of embodiment 1, wherein the napDNAbp comprises an amino acid sequence of SEQ ID NO: 18.

[2701] Embodiment 13. The method of embodiment 1, wherein the napDNAbp comprises an amino acid sequence having at least 80%, 85%, 90%, 95%, 98%, or 99% sequence identity with the amino acid sequence of any one of SEQ ID NOs: 18-88, 126, 130, 137, 141, 147, 153, 157, 445, 460, 467, and 482-487.

[2702] Embodiment 14. The method of embodiment 1, wherein the polymerase is a reverse transcriptase comprising any one of the amino acid sequences of SEQ ID NOs: 89-100, 105-122, 128-129, 132, 139, 143, 149, 154, 159, 235, 454, 471, 516, 662, 700, 701-716, 739-741, and 766.

[2703] Embodiment 15. The method of embodiment 1, wherein the polymerase is a reverse transcriptase comprising an amino acid sequence having at least 80%, 85%, 90%, 95%, 98%, or 99% sequence identity with the amino acid sequence of any one of SEQ ID

[2704] NOs: 89-100, 105-122, 128-129, 132, 139, 143, 149, 154, 159, 235, 454, 471, 516, 662, 700, 701-716, 739-741, and 766.

[2705] Embodiment 16. The method of embodiment 1, wherein the PEgRNA comprises a nucleic acid extension arm at the 3′ or 5′ ends or at an intramolecular location in the guide RNA, wherein the extension arm comprises the DNA synthesis template sequence and the primer binding site.

[2706] Embodiment 17. The method of embodiment 16, wherein the extension arm is at least 5 nucleotides, at least 6 nucleotides, at least 7 nucleotides, at least 8 nucleotides, at least 9 nucleotides, at least 10 nucleotides, at least 11 nucleotides, at least 12 nucleotides, at least 13 nucleotides, at least 14 nucleotides, at least 15 nucleotides, at least 16 nucleotides, at least 17 nucleotides, at least 18 nucleotides, at least 19 nucleotides, at least 20 nucleotides, at least 21 nucleotides, at least 22 nucleotides, at least 23 nucleotides, at least 24 nucleotides, or at least 25 nucleotides in length.

[2707] Embodiment 18. The method of embodiment 1, wherein the PEgRNA has a nucleotide sequence selected from the group consisting of SEQ ID NOs: 101-104, 181-183, 223-244, 277, 325-334, 336, 338, 340, 342, 344, 346, 348, 350, 352, 354, 356, 358, 360, 362, 364, 366, 368, 499-505, 735-761, 776-777.

[2708] Embodiment 19. A method for introducing one or more changes in the nucleotide sequence of a DNA molecule at a target locus, comprising: contacting the DNA molecule with a nucleic acid programmable DNA binding protein (napDNAbp) and a PEgRNA which targets the napDNAbp to the target locus, wherein the PEgRNA comprises a reverse transcriptase (RT) template sequence comprising at least one desired nucleotide change and a primer binding site;

[2709] thereby forming an exposed 3′ end in a DNA strand at the target locus;

[2710] thereby hybridizing the exposed 3′ end to the primer binding site to prime reverse transcription;

[2711] thereby synthesizing a single strand DNA flap comprising the at least one desired nucleotide change based on the RT template sequence by reverse transcriptase;

[2712] thereby incorporating the at least one desired nucleotide change into the corresponding endogenous DNA, thereby introducing one or more changes in the nucleotide sequence of the DNA molecule at the target locus.

[2713] Embodiment 20. The method of embodiment 19, wherein the one or more changes in the nucleotide sequence comprises a transition.

[2714] Embodiment 21. The method of embodiment 19, wherein the transition is selected from the group consisting of: (a) T to C; (b) A to G; (c) C to T; and (d) G to A.

[2715] Embodiment 22. The method of embodiment 19, wherein the one or more changes in the nucleotide sequence comprises a transversion.

[2716] Embodiment 23. The method of embodiment 22, wherein the transversion is selected from the group consisting of: (a) T to A; (b) T to G; (c) C to G; (d) C to A; (e) A to T; (f) A to C; (g) G to C; and (h) G to T.

[2717] Embodiment 24. The method of embodiment 19, wherein the one or more changes in the nucleotide sequence comprises changing (1) a G:C basepair to a T:A basepair, (2) a G:C basepair to an A:T basepair, (3) a G:C basepair to C:G basepair, (4) a T:A basepair to a G:C basepair, (5) a T:A basepair to an A:T basepair, (6) a T:A basepair to a C:G basepair, (7) a C:G basepair to a G:C basepair, (8) a C:G basepair to a T:A basepair, (9) a C:G basepair to an A:T basepair, (9) an A:T basepair to a T:A basepair, (11) an A:T basepair to a G:C basepair, or (12) an A:T basepair to a C:G basepair.

[2718] Embodiment 25. The method of embodiment 19, wherein the one or more changes in the nucleotide sequence comprises an insertion or deletion of 1, 2, 3, 4, 5, 6, 7, 8, 9, 10, 11, 12, 13, 14, 15, 16, 17, 18, 19, 20, 21, 22, 23, 24, or 25 nucleotides.

[2719] Embodiment 26. The method of embodiment 19, wherein the one or more changes in the nucleotide sequence comprises a correction to a disease-associated gene.

[2720] Embodiment 27. The method of embodiment 26, wherein the disease-associated gene is associated with a monogentic disorder selected from the group consisting of: Adenosine Deaminase (ADA) Deficiency; Alpha-1 Antitrypsin Deficiency; Cystic Fibrosis; Duchenne Muscular Dystrophy; Galactosemia; Hemochromatosis; Huntington's Disease; Maple Syrup Urine Disease; Marfan Syndrome; Neurofibromatosis Type 1; Pachyonychia Congenita; Phenylkeotnuria; Severe Combined Immunodeficiency; Sickle Cell Disease; Smith-Lemli-Opitz Syndrome; a trinucleotide repeat disorder; a prion disease; and Tay-Sachs Disease.

[2721] Embodiment 28. The method of embodiment 26, wherein the disease-associated gene is associated with a polygenic disorder selected from the group consisting of: heart disease; high blood pressure; Alzheimer's disease; arthritis; diabetes; cancer; and obesity.

[2722] Embodiment 29. The method of embodiment 19, wherein the napDNAbp is a nuclease active Cas9 or variant thereof.

[2723] Embodiment 30. The method of embodiment 19, wherein the napDNAbp is a nuclease inactive Cas9 (dCas9) or Cas9 nickase (nCas9), or a variant thereof.

[2724] Embodiment 31. The method of embodiment 19, wherein the napDNAbp comprises an amino acid sequence of SEQ ID NO: 18.

[2725] Embodiment 32. The method of embodiment 19, wherein the napDNAbp comprises an amino acid sequence having at least 80%, 85%, 90%, 95%, 98%, or 99% sequence identity with the amino acid sequence of any one of SEQ ID NOs: 18-88, 126, 130, 137, 141, 147, 153, 157, 445, 460, 467, and 482-487.

[2726] Embodiment 33. The method of embodiment 19, wherein the reverse transcriptase is introduced in trans.

[2727] Embodiment 34. The method of embodiment 19, wherein the napDNAbp comprises a fusion to a reverse transcriptase.

[2728] Embodiment 35. The method of embodiment 19, wherein the reverse transcriptase comprises any one of the amino acid sequences of SEQ ID NOs: 89-100, 105-122, 128-129, 132, 139, 143, 149, 154, 159, 235, 454, 471, 516, 662, 700, 701-716, 739-741, and 766.

[2729] Embodiment 36. The method of embodiment 19, wherein the reverse transcriptase comprises an amino acid sequence having at least 80%, 85%, 90%, 95%, 98%, or 99% sequence identity with the amino acid sequence of any one of SEQ ID NOs: 89-100, 105-122, 128-129, 132, 139, 143, 149, 154, 159, 235, 454, 471, 516, 662, 700, 701-716, 739-741, and 766.

[2730] Embodiment 37. The method of embodiment 19, wherein the step of forming an exposed 3′ end in the DNA strand at the target locus comprises nicking the DNA strand with a nuclease.

[2731] Embodiment 38. The method of embodiment 37, wherein the nuclease is the napDNAbp, is provided as a fusion domain of napDNAbp, or is provided in trans.

[2732] Embodiment 39. The method of embodiment 19, wherein the step of forming an exposed 3′ end in the DNA strand at the target locus comprises contacting the DNA strand with a chemical agent.

[2733] Embodiment 40. The method of embodiment 19, wherein the step of forming an exposed 3′ end in the DNA strand at the target locus comprises introducing a replication error.

[2734] Embodiment 41. The method of embodiment 19, wherein the step of contacting the DNA molecule with the napDNAbp and the guide RNA forms an R-loop.

[2735] Embodiment 42. The method of embodiment 41, wherein the DNA strand in which the exposed 3′ end is formed is in the R-loop.

[2736] Embodiment 43. The method of embodiment 19, wherein the PEgRNA comprises an extension arm that comprises the reverse transcriptase (RT) template sequence and the primer binding site.

[2737] Embodiment 44. The method of embodiment 43, wherein the extension arm is at the 3′ end of the guide RNA, the 5′ end of the guide RNA, or at an intramolecular position in the guide RNA.

[2738] Embodiment 45. The method of embodiment 19, wherein the PEgRNA further comprises at least one additional structure selected from the group consisting of a linker, a stem loop, a hairpin, a toeloop, an aptamer, or an RNA-protein recruitment domain.

[2739] Embodiment 46. The method of embodiment 19, wherein the PEgRNA further comprises a homology arm.

[2740] Embodiment 47. The method of embodiment 19, wherein the RT template sequence is homologous to the corresponding endogenous DNA.

[2741] Embodiment 48. A method for introducing one or more changes in the nucleotide sequence of a DNA molecule at a target locus by target-primed reverse transcription, the method comprising: (a) contacting the DNA molecule at the target locus with a (i) fusion protein comprising a nucleic acid programmable DNA binding protein (napDNAbp) and a reverse transcriptase and (ii) a guide RNA comprising an RT template comprising a desired nucleotide change;

[2742] thereby conducting target-primed reverse transcription of the RT template to generate a single strand DNA comprising the desired nucleotide change;

[2743] thereby incorporating the desired nucleotide change into the DNA molecule at the target locus through a DNA repair and/or replication process.

[2744] Embodiment 49. The method of embodiment 48, wherein the RT template is located at the 3′ end of the guide RNA, the 5′ end of the guide RNA, or at an intramolecular location in the guide RNA.

[2745] Embodiment 50. The method of embodiment 48, wherein the desired nucleotide change comprises a transition, a transversion, an insertion, or a deletion, or any combination thereof.

[2746] Embodiment 51. The method of embodiment 48, wherein the desired nucleotide change comprises a transition selected from the group consisting of: (a) T to C; (b) A to G; (c) C to T; and (d) G to A.

[2747] Embodiment 52. The method of embodiment 48, wherein the desired nucleotide change comprises a transversion selected from the group consisting of: (a) T to A; (b) T to G; (c) C to G; (d) C to A; (e) A to T; (f) A to C; (g) G to C; and (h) G to T.

[2748] Embodiment 53. The method of embodiment 48, wherein the desired nucleotide change comprises changing (1) a G:C basepair to a T:A basepair, (2) a G:C basepair to an A:T basepair, (3) a G:C basepair to C:G basepair, (4) a T:A basepair to a G:C basepair, (5) a T:A basepair to an A:T basepair, (6) a T:A basepair to a C:G basepair, (7) a C:G basepair to a G:C basepair, (8) a C:G basepair to a T:A basepair, (9) a C:G basepair to an A:T basepair, (10) an A:T basepair to a T:A basepair, (11) an A:T basepair to a G:C basepair, or (12) an A:T basepair to a C:G basepair.

[2749] Embodiment 54. A method for replacing a trinucleotide repeat expansion mutation in a target DNA molecule with a healthy sequence comprising a healthy number of repeat trinucleotides, the method comprising: (a) contacting the DNA molecule at the target locus with a (i) fusion protein comprising a nucleic acid programmable DNA binding protein (napDNAbp) and a polymerase and (ii) a PEgRNA comprising DNA synthesis template comprising the replacement sequence and a primer binding site; (b) conducting prime editingto generate a single strand DNA comprising the replacement sequence; and (c) incorporating the single strand DNA into the DNA molecule at the target locus through a DNA repair and/or replication process.

[2750] Embodiment 55. The method of embodiment 54, wherein the fusion protein comprises the amino acid sequence of PE1, PE2, or PE3.

[2751] Embodiment 56. The method of embodiment 54, wherein the napDNAbp is a Cas9 nickase (nCas9).

[2752] Embodiment 57. The method of embodiment 54, wherein the napDNAbp comprises the amino acid sequence of SEQ ID NOs: 18-88, 126, 130, 137, 141, 147, 153, 157, 445, 460, 467, and 482-487.

[2753] Embodiment 58. The method of embodiment 54, wherein the guide RNA comprises SEQ ID NO: 222.

[2754] Embodiment 59. The method of embodiment 54, wherein the step of (b) conducting prime editing comprises generating a 3′ end primer binding sequence at the target locus that is capable of priming polymerase by annealing to the primer binding site on the guide RNA.

[2755] Embodiment 60. The method of embodiment 54, wherein the trinucleotide repeat expansion mutation is associated with Huntington's Disease, Fragile X syndrome, or Friedreich's ataxia.

[2756] Embodiment 61. The method of embodiment 54, wherein the trinucleotide repeat expansion mutation comprises a repeating unit of CAG triplets.

[2757] Embodiment 62. The method of embodiment 54, wherein the trinucleotide repeat expansion mutation comprises a repeating unit of GAA triplets.

[2758] Embodiment 63. A method for introducing one or more changes in the nucleotide sequence of a DNA molecule at a target locus by target-primed reverse transcription, the method comprising: (a) contacting the DNA molecule at the target locus with a (i) fusion protein comprising a nucleic acid programmable DNA binding protein (napDNAbp) and a reverse transcriptase and (ii) a guide RNA comprising an RT template comprising a desired nucleotide change;

[2759] thereby conducting target-primed reverse transcription of the RT template to generate a single strand DNA comprising the desired nucleotide change;

[2760] thereby incorporating the desired nucleotide change into the DNA molecule at the target locus through a DNA repair and/or replication process.

[2761] Embodiment 64. The method of embodiment 63, wherein the RT template is located at the 3′ end of the guide RNA, the 5′ end of the guide RNA, or at an intramolecular location in the guide RNA.

[2762] Embodiment 65. The method of embodiment 63, wherein the desired nucleotide change comprises a transition, a transversion, an insertion, or a deletion, or any combination thereof.

[2763] Embodiment 66. The method of embodiment 63, wherein the desired nucleotide change comprises a transition selected from the group consisting of: (a) T to C; (b) A to G; (c) C to T; and (d) G to A.

[2764] Embodiment 67. The method of embodiment 63, wherein the desired nucleotide change comprises a transversion selected from the group consisting of: (a) T to A; (b) T to G; (c) C to G; (d) C to A; (e) A to T; (f) A to C; (g) G to C; and (h) G to T.

[2765] Embodiment 68. The method of embodiment 63, wherein the desired nucleotide change comprises changing (1) a G:C basepair to a T:A basepair, (2) a G:C basepair to an

[2766] A:T basepair, (3) a G:C basepair to C:G basepair, (4) a T:A basepair to a G:C basepair, (5) a T:A basepair to an A:T basepair, (6) a T:A basepair to a C:G basepair, (7) a C:G basepair to a G:C basepair, (8) a C:G basepair to a T:A basepair, (9) a C:G basepair to an A:T basepair, (10) an A:T basepair to a T:A basepair, (11) an A:T basepair to a G:C basepair, or (12) an A:T basepair to a C:G basepair.

[2767] Embodiment 69. A method of preventing or halting the progression of a prion disease by installing on or more protective mutations into PRNP encoded by a target nucleotide sequence by prime editing, the method comprising: (a) contacting the target nucleotide sequence with a (i) prime editor comprising a nucleic acid programmable DNA binding protein (napDNAbp) and a polymerase and (ii) a PEgRNA comprising an edit template encoding the functional moiety;

[2768] thereby polymerizing a single strand DNA sequence encoding the protective mutation;

[2769] thereby incorporating the single strand DNA sequence in place of a corresponding endogenous strand at the target nucleotide sequence through a DNA repair and/or replication process;

[2770] wherein the method produces a recombinant target nucleotide sequence that encodes a PRNP comprising a protective mutation and which is resistant to misfolding.

[2771] Embodiment 70. The method of embodiment 69, wherein the prion disease is a human prion disease.

[2772] Embodiment 71. The method of embodiment 69, wherein the prion disease is an animal prion disease.

[2773] Embodiment 72. The method of embodiment 69, wherein the prion disease is Creutzfeldt-Jakob Disease (CJD), Variant Creutzfeldt-Jakob Disease (νCJD), Gerstmann-Straus sler-Scheinker Syndrome, Fatal Familial Insomnia, or Kuru.

[2774] Embodiment 73. The method of embodiment 69, wherein the prion disease is Bovine Spongiform Encephalopathy (BSE or “mad cow disease”), Chronic Wasting Disease (CWD), Scrapie, Transmissible Mink Encephalopathy, Feline Spongiform Encephalopathy, and Ungulate Spongiform Encephalopathy.

[2775] Embodiment 74. The method of embodiment 69, wherein the wildtype PRNP amino acid sequence is SEQ ID NOs: 291-292.

[2776] Embodiment 75. The method of embodiment 69, wherein the method results in a modified PRNP amino acid sequence selected from the group consisting of SEQ ID NOs: 293-309, 311-323, wherein said modified PRNP protein is resistant to misfolding.

[2777] Embodiment 76. The method of embodiment 69, wherein the fusion protein comprises the amino acid sequence of PE1, PE2, or PE3.

[2778] Embodiment 77. The method of embodiment 69, wherein the napDNAbp is a Cas9 nickase (nCas9).

[2779] Embodiment 78. The method of embodiment 69, wherein the napDNAbp comprises the amino acid sequence of SEQ ID NOs: 18-88, 126, 130, 137, 141, 147, 153, 157, 445, 460, 467, and 482-487.

[2780] Embodiment 79. The method of embodiment 69, wherein the PEgRNA comprises SEQ ID NOs: 101-104, 181-183, 223-244, 277, 325-334, 336, 338, 340, 342, 344, 346, 348, 350, 352, 354, 356, 358, 360, 362, 364, 366, 368, 499-505, 735-761, 776-777.

[2781] Embodiment 80. A method of treating CDKL5 Deficiency Disorder by correcting a mutation in the cyclin-dependent kinase-like 5 gene (CDKL5) in a target nucleotide sequence by prime editing, the method comprising: (a) contacting the target nucleotide sequence with a (i) prime editor comprising a nucleic acid programmable DNA binding protein (napDNAbp) and a polymerase and (ii) a PEgRNA comprising an edit template that corrects the mutation in CDKL5;

[2782] thereby polymerizing a single strand DNA sequence encoding the edit;

[2783] thereby incorporating the single strand DNA sequence in place of a corresponding endogenous strand at the target nucleotide sequence through a DNA repair and/or replication process;

[2784] wherein the method produces a recombinant target nucleotide sequence that encodes a repaired CDKL5 gene.

[2785] Embodiment 81. The method of embodiment D80, wherein the mutation in CDKL5 is 1412delA.

Group E. Pe Methods for Modifying Protein Structure/Function and/or Mutagenesis

[2786] Embodiment 1. A method for mutagenizing a DNA molecule at a target locus by prime editing, the method comprising: (a) contacting the DNA molecule at the target locus with a (i) fusion protein comprising a nucleic acid programmable DNA binding protein (napDNAbp) and an error-prone polymer (e.g., error-prone reverse transcriptase), and (ii) a guide RNA comprising an edit template comprising a desired nucleotide change; thereby polymerizing a single stranded DNA templated from the edit template; and incorporating the single stranded DNA into the DNA molecule at the target locus through a DNA repair and/or replication process.

[2787] Embodiment 2. The method of any prior embodiment, wherein the fusion protein comprises the amino acid sequence of PE1, PE2, or PE3.

[2788] Embodiment 3. The method of any prior embodiment, wherein the napDNAbp is a Cas9 nickase (nCas9).

[2789] Embodiment 4. The method of embodiment 1, wherein the napDNAbp comprises the amino acid sequence of SEQ ID NOs: 18-88, 126, 130, 137, 141, 147, 153, 157, 445, 460, 467, and 482-487.

[2790] Embodiment 5. The method of embodiment 1, wherein the guide RNA comprises SEQ ID NO: 222.

[2791] Embodiment 6. A method of installing an immunoepitope in a protein of interest encoded by a target nucleotide sequence by prime editing, the method comprising: (a) contacting the target nucleotide sequence with a (i) prime editor comprising a nucleic acid programmable DNA binding protein (napDNAbp) and a polymerase and (ii) a PEgRNA comprising an edit template encoding the functional moiety;

[2792] thereby polymerizing a single strand DNA sequence encoding the immunoepitope;

[2793] thereby incorporating the single strand DNA sequence in place of a corresponding endogenous strand at the target nucleotide sequence through a DNA repair and/or replication process;

[2794] wherein the method produces a recombinant target nucleotide sequence that encodes a fusion protein comprising the protein of interest and the immunoepitope.

[2795] Embodiment 7. The method of embodiment 6, wherein the immunoepitope is selected from the group consisting of: tetanus toxoid (SEQ ID NO: 396); diphtheria toxin mutant CRM197 (SEQ ID NO: 630); mumps immunoepitope 1 (SEQ ID NO: 400); mumps immunoepitope 2 (SEQ ID NO: 402); mumps immunoeptitope 3 (SEQ ID NO: 404); rubella virus (SEQ ID NO: 406); hemagglutinin (SEQ ID NO: 408); neuraminidase (SEQ ID NO: 410); TAP1 (SEQ ID NO: 412); TAP2 (SEQ ID NO: 414); hemagglutinin epitopes toward class I HLA (SEQ ID NO: 416); neuraminidase epitopes toward class I HLA (SEQ ID NO: 418); hemagglutinin epitopes toward class II HLA (SEQ ID NO: 420); neuraminidase epitopes toward class II HLA (SEQ ID NO: 422); hemagglutinin epitope H5N1-bound class I and class II HLA (SEQ ID NO: 424); and neuraminidase epitope H5N1-bound class I and class II HLA (SEQ ID NO: 426).

[2796] Embodiment 8. The method of embodiment 6, wherein the fusion protein comprises the amino acid sequence of PE1, PE2, or PE3.

[2797] Embodiment 9. The method of embodiment 6, wherein the napDNAbp is a Cas9 nickase (nCas9).

[2798] Embodiment 10. The method of embodiment 6, wherein the napDNAbp comprises the amino acid sequence of SEQ ID NOs: 18-88, 126, 130, 137, 141, 147, 153, 157, 445, 460, 467, and 482-487.

[2799] Embodiment 11. The method of embodiment 6, wherein the PEgRNA comprises SEQ ID NOs: 101-104, 181-183, 223-244, 277, 325-334, 336, 338, 340, 342, 344, 346, 348, 350, 352, 354, 356, 358, 360, 362, 364, 366, 368, 499-505, 735-761, 776-777.

[2800] Embodiment 12. A method of installing a small molecule dimerization domain in a protein of interest encoded by a target nucleotide sequence by prime editing, the method comprising: (a) contacting the target nucleotide sequence with a (i) prime editor comprising a nucleic acid programmable DNA binding protein (napDNAbp) and a polymerase, and (ii) a PEgRNA comprising an edit template encoding the small molecule dimerization domain;

[2801] thereby polymerizing a single strand DNA sequence encoding the immunoepitope;

[2802] thereby incorporating the single strand DNA sequence in place of a corresponding endogenous strand at the target nucleotide sequence through a DNA repair and/or replication process;

[2803] wherein the method produces a modified target nucleotide sequence that encodes a fusion protein comprising the protein of interest and the small molecule dimerization domain.

[2804] Embodiment 13. The method of embodiment 12 further comprising conducting the method on a second protein of interest.

[2805] Embodiment 14. The method of embodiment 13, wherein the first protein of interest and the second protein of interest dimerize in the presence of a small molecule that binds to the dimerization domain on each of said proteins.

[2806] Embodiment 15. The method of embodiment 12, wherein the small molecule binding domain is FKBP12 of SEQ ID NO: 488.

[2807] Embodiment 16. The method of embodiment 12, wherein the small molecule binding domain is FKBP12-F36V of SEQ ID NO: 489.

[2808] Embodiment 17. The method of embodiment 12, wherein the small molecule binding domain is cyclophilin of SEQ ID NOs: 490 and 493-494.

[2809] Embodiment 18. The method of embodiment 12, wherein the small molecule is a dimer of a small molecule as described herein.

[2810] Embodiment 19. The method of embodiment 12, wherein the fusion protein comprises the amino acid sequence of PE1, PE2, or PE3.

[2811] Embodiment 20. The method of embodiment 12, wherein the napDNAbp is a Cas9 nickase (nCas9).

[2812] Embodiment 21. The method of embodiment 12, wherein the napDNAbp comprises the amino acid sequence of SEQ ID NOs: 18-88, 126, 130, 137, 141, 147, 153, 157, 445, 460, 467, and 482-487.

[2813] Embodiment 22. The method of embodiment 12, wherein the PEgRNA comprises SEQ ID NOs: 101-104, 181-183, 223-244, 277, 325-334, 336, 338, 340, 342, 344, 346, 348, 350, 352, 354, 356, 358, 360, 362, 364, 366, 368, 499-505, 735-761, 776-777.

[2814] Embodiment 23. A method of installing a peptide tag or epitope onto a protein using prime editing, comprising: contacting a target nucleotide sequence encoding the protein with a prime editor construct configured to insert therein a second nucleotide sequence encoding the peptide tag to result in a recombinant nucleotide sequence, such that the peptide tag and the protein are expressed from the recombinant nucleotide sequence as a fusion protein.

[2815] Embodiment 24. The method of embodiment 23, wherein the peptide tag is used for purification and/or detection of the protein.

[2816] Embodiment 25. The method of embodiment 23, wherein the peptide tag is a poly-histidine (e.g., HHHHHH SEQ ID NOs: 252-262), FLAG (e.g., DYKDDDDK) (SEQ ID NO: 2), V5 (e.g., GKPIPNPLLGLDST) (SEQ ID NO: 3), GCN4, HA (e.g., YPYDVPDYA) (SEQ ID NO: 5), Myc (e.g. EQKLISEED) (SEQ ID NO: 6), or GST.

[2817] Embodiment 26. The method of embodiment 23, wherein the peptide tag has an amino acid sequence selected from the group consisting of SEQ ID NO: 1-6, 245-249, 252-262, 264-273, 275-276, 281, 278-288, and 622.

[2818] Embodiment 27. The method of embodiment 23, wherein the peptide tag is fused to the protein by a linker.

[2819] Embodiment 28. The method of embodiment 23, wherein the fusion protein has the following structure: [protein]-[peptide tag] or [peptide tag]-[protein], wherein “]-[” represents an optional linker.

[2820] Embodiment 29. The method of embodiment 23, wherein the linker has an amino acid sequence of SEQ ID NO: 127, 165-176, 446, 453, and 767-769.

[2821] Embodiment 30. The method of embodiment 23, wherein the prime editor construct comprises a PEgRNA comprising the nucleotide sequence of SEQ ID NOs: 101-104, 181-183, 223-244, 277, 325-334, 336, 338, 340, 342, 344, 346, 348, 350, 352, 354, 356, 358, 360, 362, 364, 366, 368, 499-505, 735-761, 776-777.

[2822] Embodiment 31. The method of embodiment 23, wherein the PEgRNA comprises a spacer, a gRNA core, and an extension arm, wherein the spacer is complementary to the target nucleotide sequence and the extension arm comprises a reverse transcriptase template that encodes the peptide tag.

[2823] Embodiment 32. The method of embodiment 23, wherein the PEgRNA comprises a spacer, a gRNA core, and an extension arm, wherein the spacer is complementary to the target nucleotide sequence and the extension arm comprises a reverse transcriptase template that encodes the peptide tag.

[2824] Embodiment 33. A method of installing or deleting a functional moiety in a protein of interest encoded by a target nucleotide sequence by prime editing, the method comprising: (a) contacting the target nucleotide sequence with a (i) prime editor comprising a nucleic acid programmable DNA binding protein (napDNAbp) and a polymerase and (ii) a PEgRNA comprising an edit template encoding the functional moiety or deletion of same; (b) polymerizing a single strand DNA sequence encoding the functional moiety or deletion of same; and (c) incorporating the single strand DNA sequence in place of a corresponding endogenous strand at the target nucleotide sequence through a DNA repair and/or replication process, wherein the method produces a recombinant target nucleotide sequence that encodes a modified protein comprising the protein of interest and the functional moiety or the removal of same, wherein the functional moiety alters a modification state or localization state of the protein.

[2825] Embodiment 34. The method of embodiment 33, wherein functional moiety alters the phosphorylation, ubiquitylation, glycosylation, lipidation, hydroxylation, methylation, acetylation, crotonylation, or SUMOylation state of the protein of interest.

### Group F. PE Delivery Methods and Compositions

[2826] Embodiment 1. A polypeptide comprising an N-terminal half or a C-terminal half of a prime editor fusion protein.

[2827] Embodiment 2. The polypeptide of embodiment 1, wherein the prime editor fusion protein comprises a nucleic acid programmable DNA binding protein (napDNAbp) domain and a polymerase domain.

[2828] Embodiment 3. The polypeptide of embodiment 1, wherein the prime editor fusion protein is capable of carrying out prime editing in the presence of a prime editing guide RNA (PEgRNA).

[2829] Embodiment 4. The polypeptide of embodiment 2, wherein the napDNAbp is a Cas9 protein or variant thereof.

[2830] Embodiment 5. The polypeptide of embodiment 2, wherein the napDNAbp is a nuclease with nickase activity.

[2831] Embodiment 6. The polypeptide of embodiment 2, wherein the napDNAbp is a nuclease active Cas9, a nuclease inactive Cas9 (dCas9), or a Cas9 nickase (nCas9).

[2832] Embodiment 7. The polypeptide of embodiment 2, wherein the napDNAbp is selected from the group consisting of: Cas9, Cas12e, Cas12d, Cas12a, Cas12b1, Cas13a, Cas12c, and Argonaute and optionally has a nickase activity.

[2833] Embodiment 8. The polypeptide of embodiment 1, wherein the polypeptide is formed by splitting a prime editor fusion protein at a split site.

[2834] Embodiment 9. The polypeptide of embodiment 8, wherein the split site is a peptide bond in the napDNAbp domain.

[2835] Embodiment 10. The polypeptide of embodiment 8, wherein the split site is a peptide bond in the polymerase domain.

[2836] Embodiment 11. The polypeptide of embodiment 8, wherein the split site is a peptide bond in a linker between the napDNAbp domain and the polymerase domain.

[2837] Embodiment 12. The polypeptide of embodiment 9, wherein the split site is in the peptide bond between residues 1 and 2, 2 and 3, 3 and 4, 4 and 5, 5 and 6, 6 and 7, 7 and 8, 8 and 9, 9 and 10, 10 and 11, 11 and 12, 12 and 13, 13 and 14, 14 and 15, 16 and 17, 17 and 18, 18 and 19, 19 and 20, 20 and 21, 21 and 22, 22 and 23, 23 and 24, 24 and 25, 25 and 26, 26 and 27, 27 ad 28, 28 and 29, 29 and 30, 30 and 31, 31 and 32, 32 and 33, 33 and 34, 34 and 35, 35 and 36, 36 and 37, 37 and 38, 38 and 39, 39 and 40, 40 and 41, 41 and 42, 42 and 43, 43 and 44, 44 and 45, 45 and 46, 46 and 47, 47 and 48, 48 and 49, 49 and 50, or between any two residues between residues 50-100, 100-150, 150-200, 200-250, 250-300, 300-350, 350-400, 400-450, 450-500, 500-600, 600-700, 700-800, 800-900, 900-1000, 1000-1100, 1100-1200, 1200-1300, or 1300-1368 of SEQ ID NO: 18 (canonical SpCas9), or between any two equivalent amino acid residues of an SpCas9 homolog or equivalent of SEQ ID NO: 18.

[2838] Embodiment 13. The polypeptide of embodiment 9, wherein the split site is in the peptide bond between residues 1 and 2, 2 and 3, 3 and 4, 4 and 5, 5 and 6, 6 and 7, 7 and 8, 8 and 9, 9 and 10, 10 and 11, 11 and 12, 12 and 13, 13 and 14, 14 and 15, 16 and 17, 17 and 18, 18 and 19, 19 and 20, 20 and 21, 21 and 22, 22 and 23, 23 and 24, 24 and 25, 25 and 26, 26 and 27, 27 ad 28, 28 and 29, 29 and 30, 30 and 31, 31 and 32, 32 and 33, 33 and 34, 34 and 35, 35 and 36, 36 and 37, 37 and 38, 38 and 39, 39 and 40, 40 and 41, 41 and 42, 42 and 43, 43 and 44, 44 and 45, 45 and 46, 46 and 47, 47 and 48, 48 and 49, 49 and 50, or between any two residues between residues 50-100, 100-150, 150-200, 200-250, 250-300, 300-350, 350-400, 400-450, 450-500, 500-600, or 600-667 of SEQ ID NO: 89 (canonical reverse transcriptase, M-MLV RT), or between any two equivalent amino acid residues of a reverse transcriptase homolog or equivalent of SEQ ID NO: 89.

[2839] Embodiment 14. The polypeptide of embodiment 1, wherein the polypeptide is an N-terminal half of a prime editor fusion protein.

[2840] Embodiment 15. The polypeptide of embodiment 1, wherein the polypeptide is a C-terminal half of a prime editor fusion protein.

[2841] Embodiment 16. A nucleotide sequence encoding a polypeptide of any of embodiments 1-15 and optionally a PEgRNA.

[2842] Embodiment 17. A virus genome comprising a nucleotide sequence encoding a polypeptide of any of embodiments 1-15 and optionally a PEgRNA.

[2843] Embodiment 18. The virus genome of embodiment 17, wherein the nucleotide sequence further comprises a promoter sequence suitable for expressing the polypeptide of any of embodiments 1-15.

[2844] Embodiment 19. The virus genome of embodiment 17, wherein the nucleotide sequence further comprises a sequence encoding a PEgRNA.

[2845] Embodiment 20. A virus particle comprising a genome comprising a nucleotide sequence encoding a polypeptide of any of embodiments 1-15 and optionally a PEgRNA.

[2846] Embodiment 21. The virus particle of embodiment 20, wherein the virus particle is an adenovirus particle, an adeno-associated virus particle, or a lentivirus particle.

[2847] Embodiment 22. The virus particle of embodiment 20, wherein the polypeptide encoded by the genome is an N terminal half of a prime editor fusion protein.

[2848] Embodiment 23. The virus particle of embodiment 20, wherein the polypeptide encoded by the genome is a C terminal half of a prime editor fusion protein.

[2849] Embodiment 24. A pharmaceutical composition comprising a virus particle of any of embodiments 20-23 and a pharmaceutical excipient.

[2850] Embodiment 25. A pharmaceutical composition comprising a virus particle of embodiment 22 (encoding the N terminal half) and a pharmaceutical excipient.

[2851] Embodiment 26. A pharmaceutical composition comprising a virus particle of embodiment 23 (encoding the C terminal half) and a pharmaceutical excipient.

[2852] Embodiment 27. A ribonucleoprotein (RNP) complex comprising a nucleotide sequence encoding a polypeptide of any of embodiments 1-15 and optionally a PEgRNA.

[2853] Embodiment 28. The ribonucleoprotein (RNP) complex of embodiment 27, wherein the polypeptide encoded by the genome is an N-terminal half of a prime editor fusion protein.

[2854] Embodiment 29. The ribonucleoprotein (RNP) complex of embodiment 27, wherein the polypeptide encoded by the genome is a C-terminal half of a prime editor fusion protein.

[2855] Embodiment 30. A pharmaceutical composition comprising a ribonucleoprotein (RNP) complex of any of embodiments 27-29 and a pharmaceutical excipient.

[2856] Embodiment 31. A pharmaceutical composition comprising the ribonucleoprotein (RNP) complex of embodiment 28 (encoding the N-terminal half) and a pharmaceutical excipient.

[2857] Embodiment 32. A pharmaceutical composition comprising the ribonucleoprotein (RNP) complex of embodiment 29 (encoding the C-terminal half) and a pharmaceutical excipient.

[2858] Embodiment 33. A pharmaceutical composition comprising a first AAV particle and a second AAV particle, wherein the first AAV vector expresses an N-terminal half of a prime editor fusion protein and the second AAV vector expresses a C-terminal half of a prime editor fusion protein, wherein the N-terminal half and the C-terminal half are combined within the cell to reconstitute the prime editor.

[2859] Embodiment 34. The pharmaceutical composition of embodiment 33, wherein the first or second AAV particle also expresses a PEgRNA that targets the reconstituted prime editor to a target DNA site.

[2860] Embodiment 35. The pharmaceutical composition of embodiment 33, wherein the prime editor fusion protein comprises a nucleic acid programmable DNA binding protein (napDNAbp) domain and a polymerase domain.

[2861] Embodiment 36. The pharmaceutical composition of embodiment 33, wherein the prime editor fusion protein is capable of carrying out prime editing in the presence of a prime editing guide RNA (PEgRNA).

[2862] Embodiment 37. The pharmaceutical composition of embodiment 35, wherein the napDNAbp is a Cas9 protein or variant thereof.

[2863] Embodiment 38. The pharmaceutical composition of embodiment 35, wherein the napDNAbp is a nuclease with a nickase activity.

[2864] Embodiment 39. The pharmaceutical composition of embodiment 35, wherein the napDNAbp is a nuclease active Cas9, a nuclease inactive Cas9 (dCas9), or a Cas9 nickase (nCas9).

[2865] Embodiment 40. The pharmaceutical composition of embodiment 35, wherein the napDNAbp is selected from the group consisting of: Cas9, Cas12e, Cas12d, Cas12a, Cas12b1, Cas13a, Cas12c, and Argonaute and optionally has a nickase activity.

[2866] Embodiment 41. The pharmaceutical composition of embodiment 33, wherein N-terminal and C-terminal halves are formed by splitting the prime editor fusion protein at a split site.

[2867] Embodiment 42. The pharmaceutical composition of embodiment 41, wherein the split site is a peptide bond in a napDNAbp domain.

[2868] Embodiment 43. The pharmaceutical composition of embodiment 41, wherein the split site is a peptide bond in a polymerase domain.

[2869] Embodiment 44. The pharmaceutical composition of embodiment 41, wherein the split site is a peptide bond in a linker.

[2870] Embodiment 45. The pharmaceutical composition of embodiment 41, wherein the split site is in the peptide bond between residues 1 and 2, 2 and 3, 3 and 4, 4 and 5, 5 and 6, 6 and 7, 7 and 8, 8 and 9, 9 and 10, 10 and 11, 11 and 12, 12 and 13, 13 and 14, 14 and 15, 16 and 17, 17 and 18, 18 and 19, 19 and 20, 20 and 21, 21 and 22, 22 and 23, 23 and 24, 24 and 25, 25 and 26, 26 and 27, 27 ad 28, 28 and 29, 29 and 30, 30 and 31, 31 and 32, 32 and 33, 33 and 34, 34 and 35, 35 and 36, 36 and 37, 37 and 38, 38 and 39, 39 and 40, 40 and 41, 41 and 42, 42 and 43, 43 and 44, 44 and 45, 45 and 46, 46 and 47, 47 and 48, 48 and 49, 49 and 50, or between any two residues between residues 50-100, 100-150, 150-200, 200-250, 250-300, 300-350, 350-400, 400-450, 450-500, 500-600, 600-700, 700-800, 800-900, 900-1000, 1000-1100, 1100-1200, 1200-1300, or 1300-1368 of SEQ ID NO: 18 (canonical SpCas9), or between any two equivalent amino acid residues of an SpCas9 homolog or equivalent of SEQ ID NO: 18.

[2871] Embodiment 46. The pharmaceutical composition of embodiment 41, wherein the split site is in the peptide bond between residues 1 and 2, 2 and 3, 3 and 4, 4 and 5, 5 and 6, 6 and 7, 7 and 8, 8 and 9, 9 and 10, 10 and 11, 11 and 12, 12 and 13, 13 and 14, 14 and 15, 16 and 17, 17 and 18, 18 and 19, 19 and 20, 20 and 21, 21 and 22, 22 and 23, 23 and 24, 24 and 25, 25 and 26, 26 and 27, 27 ad 28, 28 and 29, 29 and 30, 30 and 31, 31 and 32, 32 and 33, 33 and 34, 34 and 35, 35 and 36, 36 and 37, 37 and 38, 38 and 39, 39 and 40, 40 and 41, 41 and 42, 42 and 43, 43 and 44, 44 and 45, 45 and 46, 46 and 47, 47 and 48, 48 and 49, 49 and 50, or between any two residues between residues 50-100, 100-150, 150-200, 200-250, 250-300, 300-350, 350-400, 400-450, 450-500, 500-600, or 600-667 of SEQ ID NO: 89 (canonical reverse transcriptase, M-MLV RT), or between any two equivalent amino acid residues of a reverse transcriptase homolog or equivalent of SEQ ID NO: 89.

[2872] Embodiment 47. The pharmaceutical composition of embodiment 33, wherein the N-terminal half of the prime editor fusion protein has an amino acid sequence encoding the N-terminal prime editor fusion proteins as described herein.

[2873] Embodiment 48. The pharmaceutical composition of embodiment 33, wherein the C-terminal half of the prime editor fusion protein has an amino acid sequence encoding the N-terminal prime editor fusion proteins as described herein.

[2874] Embodiment 49. A method of delivering a prime editor fusion protein to a cell comprising transfecting the cell with a first AAV particle and a second AAV particle, wherein the first AAV vector expresses an N-terminal half of a prime editor fusion protein and the second AAV vector expresses a C-terminal half of a prime editor fusion protein, wherein the N-terminal half and the C-terminal half are combined within the cell to reconstitute the prime editor fusion protein.

[2875] Embodiment 50. The method of embodiment 49, wherein the first or second AAV particle also expresses a PEgRNA that targets the reconstituted prime editor to a target DNA site.

[2876] Embodiment 51. The method of embodiment 49, wherein the prime editor fusion protein comprises a nucleic acid programmable DNA binding protein (napDNAbp) domain and a polymerase domain.

[2877] Embodiment 52. The method of embodiment 49, wherein the prime editor fusion protein is capable of carrying out prime editing in the presence of an prime editing guide RNA (PEgRNA).

[2878] Embodiment 53. The method of embodiment 51, wherein the napDNAbp is a Cas9 protein or variant thereof.

[2879] Embodiment 54. The method of embodiment 53, wherein the napDNAbp is a nuclease with nickase activity.

[2880] Embodiment 55. The method of embodiment 53, wherein the napDNAbp is a nuclease active Cas9, a nuclease inactive Cas9 (dCas9), or a Cas9 nickase (nCas9).

[2881] Embodiment 56. The method of embodiment 53, wherein the napDNAbp is selected from the group consisting of: Cas9, Cas12e, Cas12d, Cas12a, Cas12b1, Cas13a, Cas12c, and Argonaute and optionally has a nickase activity.

[2882] Embodiment 57. The method of embodiment 49, wherein N-terminal and C-terminal halves are formed by splitting the prime editor fusion protein at a split site.

[2883] Embodiment 58. The method of embodiment 57, wherein the split site is a peptide bond in a napDNAbp domain.

[2884] Embodiment 59. The method of embodiment 57, wherein the split site is a peptide bond in a polymerase domain.

[2885] Embodiment 60. The method of embodiment 57, wherein the split site is a peptide bond in a linker.

[2886] Embodiment 61. The method of embodiment 57, wherein the split site is in the peptide bond between residues 1 and 2, 2 and 3, 3 and 4, 4 and 5, 5 and 6, 6 and 7, 7 and 8, 8 and 9, 9 and 10, 10 and 11, 11 and 12, 12 and 13, 13 and 14, 14 and 15, 16 and 17, 17 and 18, 18 and 19, 19 and 20, 20 and 21, 21 and 22, 22 and 23, 23 and 24, 24 and 25, 25 and 26, 26 and 27, 27 ad 28, 28 and 29, 29 and 30, 30 and 31, 31 and 32, 32 and 33, 33 and 34, 34 and 35, 35 and 36, 36 and 37, 37 and 38, 38 and 39, 39 and 40, 40 and 41, 41 and 42, 42 and 43, 43 and 44, 44 and 45, 45 and 46, 46 and 47, 47 and 48, 48 and 49, 49 and 50, or between any two residues between residues 50-100, 100-150, 150-200, 200-250, 250-300, 300-350, 350-400, 400-450, 450-500, 500-600, 600-700, 700-800, 800-900, 900-1000, 1000-1100, 1100-1200, 1200-1300, or 1300-1368 of SEQ ID NO: 18 (canonical SpCas9), or between any two equivalent amino acid residues of an SpCas9 homolog or equivalent of SEQ ID NO: 18.

[2887] Embodiment 62. The method of embodiment 57, wherein the split site is in the peptide bond between residues 1 and 2, 2 and 3, 3 and 4, 4 and 5, 5 and 6, 6 and 7, 7 and 8, 8 and 9, 9 and 10, 10 and 11, 11 and 12, 12 and 13, 13 and 14, 14 and 15, 16 and 17, 17 and 18, 18 and 19, 19 and 20, 20 and 21, 21 and 22, 22 and 23, 23 and 24, 24 and 25, 25 and 26, 26 and 27, 27 ad 28, 28 and 29, 29 and 30, 30 and 31, 31 and 32, 32 and 33, 33 and 34, 34 and 35, 35 and 36, 36 and 37, 37 and 38, 38 and 39, 39 and 40, 40 and 41, 41 and 42, 42 and 43, 43 and 44, 44 and 45, 45 and 46, 46 and 47, 47 and 48, 48 and 49, 49 and 50, or between any two residues between residues 50-100, 100-150, 150-200, 200-250, 250-300, 300-350, 350-400, 400-450, 450-500, 500-600, or 600-667 of SEQ ID NO: 89 (canonical reverse transcriptase, M-MLV RT), or between any two equivalent amino acid residues of a reverse transcriptase homolog or equivalent of SEQ ID NO: 89.

[2888] Embodiment 63. The method of embodiment 49, wherein the N-terminal half of the prime editor fusion protein has an amino acid sequence encoding the N-terminal prime editor fusion proteins as described herein.

[2889] Embodiment 64. The method of embodiment 49, wherein the C-terminal half of the prime editor fusion protein has an amino acid sequence encoding the C-terminal prime editor fusion proteins as described herein.

[2890] Embodiment 65. The method of embodiment 49, wherein the first AAV particle comprises a recombinant AAV genome comprising a nucleotide sequence which encodes the first prime editor component.

[2891] Embodiment 66. The method of embodiment 49, wherein the second AAV particle comprises a recombinant AAV genome comprising a nucleotide sequence which encodes the second prime editor component.

[2892] Embodiment 67. The method of embodiment 49, wherein the transfecting step is conducted in vivo.

[2893] Embodiment 68. The method of embodiment 49, wherein the transfecting step is conducted ex vivo.

[2894] Embodiment 69. The method of embodiment 50, wherein the target DNA site is a disease-associated gene.

[2895] Embodiment 70. The method of embodiment 69, wherein the disease-associated gene is associated with a monogentic disorder selected from the group consisting of: Adenosine Deaminase (ADA) Deficiency; Alpha-1 Antitrypsin Deficiency; Cystic Fibrosis; Duchenne Muscular Dystrophy; Galactosemia; Hemochromatosis; Huntington's Disease; Maple Syrup Urine Disease; Marfan Syndrome; Neurofibromatosis Type 1; Pachyonychia Congenita; Phenylkeotnuria; Severe Combined Immunodeficiency; Sickle Cell Disease; Smith-Lemli-Opitz Syndrome; a trinucleotide repeat disorder; a prion disease; and Tay-Sachs Disease.

[2896] Embodiment 71. The method of embodiment 69, wherein the disease-associated gene is associated with a polygenic disorder selected from the group consisting of: heart disease; high blood pressure; Alzheimer's disease; arthritis; diabetes; cancer; and obesity.

[2897] Embodiment 72. The method of embodiment 51, wherein the programmable DNA binding protein (napDNAbp) domain.

[2898] Embodiment 73. The method of embodiment 51, wherein the polymerase domain is a reverse transcriptase.

[2899] Embodiment 74. The method of embodiment 73, wherein the reverse transcriptase comprises any one of the amino acid sequences of SEQ ID NOs: 89-100, 105-122, 128-129, 132, 139, 143, 149, 154, 159, 235, 454, 471, 516, 662, 700, 701-716, 739-741, and 766.

[2900] Embodiment 75. The method of embodiment 73, wherein the reverse transcriptase comprises an amino acid sequence having at least 80%, 85%, 90%, 95%, 98%, or 99% sequence identity with the amino acid sequence of any one of SEQ ID NOs: 89-100, 105-122, 128-129, 132, 139, 143, 149, 154, 159, 235, 454, 471, 516, 662, 700, 701-716, 739-741, and 766.

[2901] Embodiment 76. The method of embodiment 73, wherein the napDNAbp comprises an amino acid sequence of SEQ ID NO: 18.

[2902] Embodiment 77. The method of embodiment 73, wherein the napDNAbp comprises an amino acid sequence having at least 80%, 85%, 90%, 95%, 98%, or 99% sequence identity with the amino acid sequence of any one of SEQ ID NOs: 18-88, 126, 130, 137, 141, 147, 153, 157, 445, 460, 467, and 482-487.

[2903] Embodiment 78. The polypeptide of embodiment 8, wherein the split site is between 1023 and 1024 of SEQ ID NO: 18, or at a corresponding position in an amino acid sequence having at least 85%, at least 90%, at least 95%, at least 99%, or at least 99.5% sequence identity with SEQ ID NO: 18.

### Group G. Pe Methods for Modifying RNA Structure/Function

[2904] Embodiment 1. A method of installing a ribonucleotide motif or tag in an RNA of interest encoded by a target nucleotide sequence by prime editing, the method comprising: (a) contacting the target nucleotide sequence with a (i) prime editor comprising a nucleic acid programmable DNA binding protein (napDNAbp) and a polymerase, and (ii) a PEgRNA comprising an edit template encoding the ribonucleotide motif or tag; thereby polymerizing a single strand DNA sequence encoding the ribonucleotide motif or tag; and incorporating the single strand DNA sequence in place of a corresponding endogenous strand at the target nucleotide sequence through a DNA repair and/or replication process, wherein the method produces a target nucleotide sequence that encodes a modified RNA of interest comprising the ribonucleotide motif or tag.

[2905] Embodiment 2. The method of embodiment 1, wherein ribonucleotide motif or tag is a detection moiety.

[2906] Embodiment 3. The method of embodiment 1, wherein the ribonucleotide motif or tag affects the expression level of the RNA of interest.

[2907] Embodiment 4. The method of embodiment 1, wherein the ribonucleotide motif or tag affects the transport or subcellular location of the RNA of interest.

[2908] Embodiment 5. The method of embodiment 1, wherein the ribonucleotide motif or tag is selected from the group consisting of SV40 type 1, SV40 type 2, SV40 type 3, hGH, BGH, rbGlob, TK, MALAT1 ENE-mascRNA, KSHV PAN ENE, Smbox/U1 snRNA box, U1 snRNA 3′ box, tRNA-lysine, broccoli aptamer, spinach aptamer, mango aptamer, HDV ribozyme, and m6A.

[2909] Embodiment 6. The method of embodiment 1, wherein the PEgRNA comprises SEQ ID NOs: 101-104, 181-183, 223-244, 277, 325-334, 336, 338, 340, 342, 344, 346, 348, 350, 352, 354, 356, 358, 360, 362, 364, 366, 368, 499-505, 735-761, 776-777 (see Table).

[2910] Embodiment 7. The method of embodiment 1, wherein the fusion protein comprises the amino acid sequence of PE1, PE2, or PE3.

[2911] Embodiment 8. The method of embodiment 1, wherein the napDNAbp is a Cas9 nickase (nCas9).

[2912] Embodiment 9. The method of embodiment 1, wherein the napDNAbp comprises the amino acid sequence of SEQ ID NOs: 18-88, 126, 130, 137, 141, 147, 153, 157, 445, 460, 467, and 482-487.

### Group H. Pe Methods for Making Gene Libraries

[2913] Embodiment 1. A method of constructing a programmed mutant gene library by prime editing, the method comprising:

[2914] (a) contacting a library of target nucleotide sequences each comprising one or more target genetic loci with a (i) prime editor comprising a nucleic acid programmable DNA binding protein (napDNAbp) and a polymerase, and (ii) a PEgRNA comprising an edit template comprising a sequence having at least one genetic change relative to the one or more target genetic loci;

[2915] thereby polymerizing a single strand DNA sequence templated by the edit template; and

[2916] incorporating the single strand DNA sequence in place of the one or more target genetic loci through a DNA repair and/or replication process, thereby incorporating the at least one genetic change into the target genetic loci of the target nucleotide sequences of said library.

[2917] Embodiment 2. The method of embodiment 1, wherein the library is a plasmid library.

[2918] Embodiment 3. The method of embodiment 1, wherein the library is a phage library.

[2919] Embodiment 4. The method of embodiment 1, wherein the one or more target genetic loci comprise a region encoding a protein.

[2920] Embodiment 5. The method of embodiment 1, wherein the one or more target genetic loci comprise a region encoding a secondary structure motif of a protein.

[2921] Embodiment 6. The method of embodiment 5, wherein the secondary structure motif is an alpha helix.

[2922] Embodiment 7. The method of embodiment 5, wherein the secondary structure motif is a beta sheet.

[2923] Embodiment 8. The method of embodiment 1, wherein the napDNAbp is a Cas9 protein or variant thereof.

[2924] Embodiment 9. The method of embodiment 1, wherein the napDNAbp is a nuclease with a nickase activity.

[2925] Embodiment 10. The method of embodiment 1, wherein the napDNAbp is a nuclease active Cas9, a nuclease inactive Cas9 (dCas9), or a Cas9 nickase (nCas9).

[2926] Embodiment 11. The method of embodiment 1, wherein the napDNAbp comprises an amino acid sequence of SEQ ID NO: 18.

[2927] Embodiment 12. The method of embodiment 1, wherein the napDNAbp comprises an amino acid sequence having at least 80%, 85%, 90%, 95%, 98%, or 99% sequence identity with the amino acid sequence of any one of SEQ ID NOs: 18-88, 126, 130, 137, 141, 147, 153, 157, 445, 460, 467, and 482-487.

[2928] Embodiment 13. The method of embodiment 1, wherein the polymerase domain is a reverse transcriptase.

[2929] Embodiment 14. The method of embodiment 13, wherein the reverse transcriptase comprises any one of the amino acid sequences of SEQ ID NOs: 89-100, 105-122, 128-129, 132, 139, 143, 149, 154, 159, 235, 454, 471, 516, 662, 700, 701-716, 739-741, and 766.

[2930] Embodiment 15. The method of embodiment 14, wherein the reverse transcriptase comprises an amino acid sequence having at least 80%, 85%, 90%, 95%, 98%, or 99% sequence identity with the amino acid sequence of any one of SEQ ID NOs: 89-100, 105-122, 128-129, 132, 139, 143, 149, 154, 159, 235, 454, 471, 516, 662, 700, 701-716, 739-741, and 766.

[2931] Embodiment 16. The method of embodiment 1, wherein the at least one genetic change in the edit template is an insertion.

[2932] Embodiment 17. The method of embodiment 1, wherein the at least one genetic change in the edit template is a deletion.

[2933] Embodiment 18. The method of embodiment 1, wherein the at least one genetic change in the edit template is substitution.

[2934] Embodiment 19. The method of embodiment 1, wherein the at least one genetic change is an insertion of one or more codons.

[2935] Embodiment 20. The method of embodiment 1, wherein the at least one genetic change is a deletion of one or more codons.

[2936] Embodiment 21. The method of embodiment 1, wherein the at least one genetic change is the insertion of a stop codon.

[2937] Embodiment 22. The method of embodiment 1, wherein the at least one genetic change is the conversion of a non-stop codon to a stop codon.

[2938] Embodiment 23. The method of embodiment 1, wherein the method is conduct simultaneously at least 2, or 3, or 4, or 5, or 6, or 7, or 8, or 9, or 10, or between 10-100, or between 100-200, or between 200-300, or between 300-400, or between 400-500 target genetic loci in each of the target nucleotide sequences of the library.

[2939] Embodiment 24. The method of embodiment 1, wherein the method is conducted during PACE or PANCE evolution, and wherein each instance of incorporating the at least one genetic change into the target genetic loci of the target nucleotide sequences of said library also installs a new target sequence.

### Group I. Pe Methods for Off-Target Detection

[2940] Embodiment 1. A method of evaluating off-target editing by a prime editor, the method comprising:

[2941] (a) contacting a target nucleotide sequence having an edit site with a (i) prime editor fusion protein comprising a nucleic acid programmable DNA binding protein (napDNAbp) and a polymerase and (ii) a PEgRNA comprising a DNA synthesis template that encodes a detectable sequence;

[2942] wherein the PEgRNA complexes with the fusion protein and guides said fusion protein to the edit site and, if present, to one or more off-target sites;

[2943] and wherein the prime editor fusion protein installs the detectable sequence at the edit site, and, if present, at the one or more off-target sites;

[2944] (b) determining the nucleotide sequence of the edit site and the one or more off-target sites.

[2945] Embodiment 2. The method of embodiment 1, wherein the target nucleotide sequence is a genome.

[2946] Embodiment 3. The method of embodiment 1, wherein the step of contacting is in vitro.

[2947] Embodiment 4. The method of embodiment 1, wherein the step of contacting is in vivo.

[2948] Embodiment 5. The method of embodiment 1, wherein the edit site is a mutation in a disease-associated gene.

[2949] Embodiment 6. The method of embodiment 5, wherein the mutation is a single base substitution, insertion, deletion, or inversion.

[2950] Embodiment 7. The method of embodiment 1, wherein the disease-associated gene is associated with a monogentic disorder selected from the group consisting of: Adenosine Deaminase (ADA) Deficiency; Alpha-1 Antitrypsin Deficiency; Cystic Fibrosis; Duchenne Muscular Dystrophy; Galactosemia; Hemochromatosis; Huntington's Disease; Maple Syrup Urine Disease; Marfan Syndrome; Neurofibromatosis Type 1; Pachyonychia Congenita; Phenylkeotnuria; Severe Combined Immunodeficiency; Sickle Cell Disease; Smith-Lemli-Opitz Syndrome; and Tay-Sachs Disease.

[2951] Embodiment 8. The method of embodiment 1, wherein the disease-associated gene is associated with a polygenic disorder selected from the group consisting of: heart disease; high blood pressure; Alzheimer's disease; arthritis; diabetes; cancer; and obesity.

[2952] Embodiment 9. The method of embodiment 1, wherein the fusion protein has an amino acid sequence of SEQ ID NOs: 101-104, 181-183, 223-244, 277, 325-334, 336, 338, 340, 342, 344, 346, 348, 350, 352, 354, 356, 358, 360, 362, 364, 366, 368, 499-505, 735-761, 776-777, or an amino acid sequence having at least 80%, 85%, 90%, 95%, 98%, or 99% sequence identity with SEQ ID NOs: 101-104, 181-183, 223-244, 277, 325-334, 336, 338, 340, 342, 344, 346, 348, 350, 352, 354, 356, 358, 360, 362, 364, 366, 368, 499-505, 735-761, 776-777.

[2953] Embodiment 10. The method of embodiment 1, wherein the napDNAbp is Cas9, Cas12e, Cas12d, Cas12a, Cas12b1, Cas13a, Cas12c, or Argonaute, or a variant of Cas9, Cas12e, Cas12d, Cas12a, Cas12b1, Cas13a, Cas12c, or Argonaute.

[2954] Embodiment 11. The method of embodiment 1, wherein the napDNAbp is a Cas9 or variant thereof.

[2955] Embodiment 12. The method of embodiment 1, wherein the napDNAbp is a nuclease active Cas9, a nuclease inactive Cas9 (dCas9), or a Cas9 nickase (nCas9).

[2956] Embodiment 13. The method of embodiment 1, wherein the napDNAbp is Cas9 nickase (nCas9).

[2957] Embodiment 14. The method of embodiment 1, wherein the napDNAbp comprises the amino acid sequence of SEQ ID NO: 18, or an amino acid sequence having at least 80%, 85%, 90%, 95%, 98%, or 99% sequence identity with SEQ ID NO: 18.

[2958] Embodiment 15. The method of embodiment 1, wherein the napDNAbp is SpCas9 wild type or a variant thereof of any one of amino acid sequences SEQ ID NOs: 18-88, 126, 130, 137, 141, 147, 153, 157, 445, 460, 467, and 482-487, or an amino acid sequence having at least 80%, 85%, 90%, 95%, 98%, or 99% sequence identity with any of SEQ ID NOs: 18-88, 126, 130, 137, 141, 147, 153, 157, 445, 460, 467, and 482-487.

[2959] Embodiment 16. The method of embodiment 1, wherein the napDNAbp is an SpCas9 ortholog.

[2960] Embodiment 17. The method of embodiment 1, wherein the napDNAbp is any one of amino acid sequences SEQ ID NOs: 18-88, 126, 130, 137, 141, 147, 153, 157, 445, 460, 467, and 482-487, or an amino acid sequence having at least 80%, 85%, 90%, 95%, 98%, or 99% sequence identity with any of SEQ ID NOs: 18-88, 126, 130, 137, 141, 147, 153, 157, 445, 460, 467, and 482-487.

[2961] Embodiment 18. The method of embodiment 1, wherein the napDNAbp comprises an amino acid sequence having at least 80%, 85%, 90%, 95%, 98%, or 99% sequence identity with the amino acid sequence of any one of SEQ ID NOs: 18-88, 126, 130, 137, 141, 147, 153, 157, 445, 460, 467, and 482-487.

[2962] Embodiment 19. The method of embodiment 1, wherein the polymerase comprises an RNA-dependent DNA polymerase activity.

[2963] Embodiment 20. The method of embodiment 1, wherein the polymerase is a reverse transcriptase.

[2964] Embodiment 21. The method of embodiment 1, wherein the reverse transcriptase is a naturally occuring wild type reverse transcriptase having an amino acid sequence of any one of SEQ ID NOs: 89 or an amino acid sequence having at least 80%, 85%, 90%, 95%, 98%, or 99% sequence identity with any of SEQ ID NOs: 89.

[2965] Embodiment 22. The method of embodiment 1, wherein the reverse transcriptase is a variant reverse transcriptase having an amino acid sequence of any one of SEQ ID NOs: 89-100, 105-122, 128-129, 132, 139, 143, 149, 154, 159, 235, 454, 471, 516, 662, 700, 701-716, 739-741, and 766 or an amino acid sequence having at least 80%, 85%, 90%, 95%, 98%, or 99% sequence identity with any of SEQ ID NOs: 89-100, 105-122, 128-129, 132, 139, 143, 149, 154, 159, 235, 454, 471, 516, 662, 700, 701-716, 739-741, and 766.

[2966] Embodiment 23. The method of embodiment 1, wherein the reverse transcriptase comprises any one of the amino acid sequences of SEQ ID NOs: 89-100, 105-122, 128-129, 132, 139, 143, 149, 154, 159, 235, 454, 471, 516, 662, 700, 701-716, 739-741, and 766.

[2967] Embodiment 24. The method of embodiment 1, wherein the reverse transcriptase comprises an amino acid sequence having at least 80%, 85%, 90%, 95%, 98%, or 99% sequence identity with the amino acid sequence of any one of SEQ ID NOs: 89-100, 105-122, 128-129, 132, 139, 143, 149, 154, 159, 235, 454, 471, 516, 662, 700, 701-716, 739-741, and 766.

[2968] Embodiment 25. The method of embodiment 1, wherein the detectable sequence is an insertion of at least 1, or at least 2, or at least 3, or at least 4, or at least 5, or at least 6, or at least 7, or at least 8, or at least 9, or at least 10, or at least 11, or at least 12, or at least 13, or at least 14, or at least 15, or at least 16, or at least 17, or at least 18, or at least 19, or at least 20, or at least 21, or at least 22, or at least 23, or at least 24, or at least 25, or at least 26, or at least 27, or at least 28, or at least 29, or at least 30, or at least 31, or at least 32, or at least 33, or at least 34, or at least 35, or at least 40, or at least 50, or at least 60, or at least 70, or at least 80, or at least 90, or at least 100 nucleobases.

[2969] Embodiment 26. The method of embodiment 1, wherein the detectable sequence is a deletion of at least 1, or at least 2, or at least 3, or at least 4, or at least 5, or at least 6, or at least 7, or at least 8, or at least 9, or at least 10, or at least 11, or at least 12, or at least 13, or at least 14, or at least 15, or at least 16, or at least 17, or at least 18, or at least 19, or at least 20, or at least 21, or at least 22, or at least 23, or at least 24, or at least 25, or at least 26, or at least 27, or at least 28, or at least 29, or at least 30, or at least 31, or at least 32, or at least 33, or at least 34, or at least 35, or at least 40, or at least 50, or at least 60, or at least 70, or at least 80, or at least 90, or at least 100 nucleobases.

[2970] Embodiment 27. The method of embodiment 1, wherein the detectable sequence is a nucleobase substitution.

[2971] Embodiment 28. The method of embodiment 1, wherein the detectable sequence is a transition mutation.

[2972] Embodiment 29. The method of embodiment 1, wherein the detectable sequence is a transversion mutation.

[2973] Embodiment 30. The method of embodiment 1, wherein the detectable sequence is a single nucleotide substitution selected from the group consisting of: (1) a G to T substitution, (2) a G to A substitution, (3) a G to C substitution, (4) a T to G substitution, (5) a T to A substitution, (6) a T to C substitution, (7) a C to G substitution, (8) a C to T substitution, (9) a C to A substitution, (10) an A to T substitution, (11) an A to G substitution, and (12) an A to C substitution.

[2974] Embodiment 31. The method of embodiment 1, wherein the detectable sequence is a single nucleotide substitution that converts (1) a G:C basepair to a T:A basepair, (2) a G:C basepair to an A:T basepair, (3) a G:C basepair to C:G basepair, (4) a T:A basepair to a

[2975] G:C basepair, (5) a T:A basepair to an A:T basepair, (6) a T:A basepair to a C:G basepair, (7) a C:G basepair to a G:C basepair, (8) a C:G basepair to a T:A basepair, (9) a C:G basepair to an A:T basepair, (10) an A:T basepair to a T:A basepair, (11) an A:T basepair to a G:C basepair, or (12) an A:T basepair to a C:G basepair.

[2976] Embodiment 32. The method of embodiment 1, wherein the detectable sequence is a barcode sequence.

[2977] Embodiment 33. The method of embodiment 1, wherein step (d) of determining the nucleotide sequence at the on-target and off-target sites comprises (i) fragmenting the target nucleotide sequence to form fragments, (ii) attaching adapter sequences to the ends of the fragments, (iii) PCR amplifying an amplicon using a pair of primers wherein one primer anneals to an adapter sequence attached at one end of the fragments, and another primer that anneals to an adapter sequence inserted by prime editing located within the fragment, and (iv) sequencing the amplicon to determine the location of the edit.

### Group J. Pe Methods for Cell Data Recording

[2978] Embodiment 1. A method of recording a cellular event by prime editing, the method comprising: (A) introducing into a cell one or more constructs encoding (i) a prime editor fusion protein comprising an napDNAbp and an RNA-dependent DNA polymerase and (ii) a PEgRNA, wherein the expression of the fusion protein and/or the PEgRNA is induced by the occurrence of a cellular event, and wherein upon expression of the fusion protein and/or the PEgRNA results in prime editing of a target edit site in the genome of the cell to introduce a detectable sequence, and (B) identifying the detectable sequence, thereby identifying the occurrence of the cellular event.

[2979] Embodiment 2. The method of embodiment 1, wherein the prime editing of step (A) simultaneously introduces a new target edit site such that the recording of the cellular event may occur iteratively.

[2980] Embodiment 3. The method of embodiment 1, wherein the PEgRNA comprises an edit template that encodes the detectable sequence.

[2981] Embodiment 4. The method of embodiment 3, wherein the edit template further encodes a new target edit site.

[2982] Embodiment 5. The method of embodiment 1, wherein the detectable sequence is an insertion of at least 1, or at least 2, or at least 3, or at least 4, or at least 5, or at least 6, or at least 7, or at least 8, or at least 9, or at least 10, or at least 11, or at least 12, or at least 13, or at least 14, or at least 15, or at least 16, or at least 17, or at least 18, or at least 19, or at least 20, or at least 21, or at least 22, or at least 23, or at least 24, or at least 25, or at least 26, or at least 27, or at least 28, or at least 29, or at least 30, or at least 31, or at least 32, or at least 33, or at least 34, or at least 35, or at least 40, or at least 50, or at least 60, or at least 70, or at least 80, or at least 90, or at least 100 nucleobases.

[2983] Embodiment 6. The method of embodiment 1, wherein the detectable sequence is a deletion of at least 1, or at least 2, or at least 3, or at least 4, or at least 5, or at least 6, or at least 7, or at least 8, or at least 9, or at least 10, or at least 11, or at least 12, or at least 13, or at least 14, or at least 15, or at least 16, or at least 17, or at least 18, or at least 19, or at least 20, or at least 21, or at least 22, or at least 23, or at least 24, or at least 25, or at least 26, or at least 27, or at least 28, or at least 29, or at least 30, or at least 31, or at least 32, or at least 33, or at least 34, or at least 35, or at least 40, or at least 50, or at least 60, or at least 70, or at least 80, or at least 90, or at least 100 nucleobases.

[2984] Embodiment 7. The method of embodiment 1, wherein the detectable sequence is a nucleobase substitution.

[2985] Embodiment 8. The method of embodiment 1, wherein the detectable sequence is a transition mutation.

[2986] Embodiment 9. The method of embodiment 1, wherein the detectable sequence is a transversion mutation.

[2987] Embodiment 10. The method of embodiment 1, wherein the detectable sequence is a single nucleotide substitution of wherein the single nucleotide substitution is (1) a G to T substitution, (2) a G to A substitution, (3) a G to C substitution, (4) a T to G substitution, (5) a T to A substitution, (6) a T to C substitution, (7) a C to G substitution, (8) a C to T substitution, (9) a C to A substitution, (10) an A to T substitution, (11) an A to G substitution, or (12) an A to C substitution.

[2988] Embodiment 11. The method of embodiment 1, wherein the detectable sequence is a single nucleotide substitution that converts (1) a G:C basepair to a T:A basepair, (2) a G:C basepair to an A:T basepair, (3) a G:C basepair to C:G basepair, (4) a T:A basepair to a G:C basepair, (5) a T:A basepair to an A:T basepair, (6) a T:A basepair to a C:G basepair, (7) a C:G basepair to a G:C basepair, (8) a C:G basepair to a T:A basepair, (9) a C:G basepair to an A:T basepair, (10) an A:T basepair to a T:A basepair, (11) an A:T basepair to a G:C basepair, or (12) an A:T basepair to a C:G basepair.

[2989] Embodiment 12. The method of embodiment 1, wherein the detectable sequence is a barcode sequence.

[2990] Embodiment 13. The method of embodiment 1, wherein the detectable sequence increases in length over time as a result of iterative insertion of the detectable sequence for each occurrence of the cellular event.

[2991] Embodiment 14. The method of embodiment 1, wherein the detecting step comprises sequencing the edited target site, or an amplicon of the edited target site.

[2992] Embodiment 15. The method of embodiment 1, wherein the napDNAbp is Cas9, Cas12e, Cas12d, Cas12a, Cas12b1, Cas13a, Cas12c, or Argonaute, or a variant of Cas9, Cas12e, Cas12d, Cas12a, Cas12b1, Cas13a, Cas12c, or Argonaute.

[2993] Embodiment 16. The method of embodiment 1, wherein the napDNAbp is a Cas9 or variant thereof.

[2994] Embodiment 17. The method of embodiment 1, wherein the napDNAbp is a nuclease active Cas9, a nuclease inactive Cas9 (dCas9), or a Cas9 nickase (nCas9).

[2995] Embodiment 18. The method of embodiment 1, wherein the napDNAbp is Cas9 nickase (nCas9).

[2996] Embodiment 19. The method of embodiment 1, wherein the napDNAbp comprises the amino acid sequence of SEQ ID NO: 18, or an amino acid sequence having at least 80%, 85%, 90%, 95%, 98%, or 99% sequence identity with SEQ ID NO: 18.

[2997] Embodiment 20. The method of embodiment 1, wherein the napDNAbp is SpCas9 wild type or a variant thereof of any one of amino acid sequences SEQ ID NOs: 18-88, 126, 130, 137, 141, 147, 153, 157, 445, 460, 467, and 482-487, or an amino acid sequence having at least 80%, 85%, 90%, 95%, 98%, or 99% sequence identity with any of SEQ ID NOs: 18-88, 126, 130, 137, 141, 147, 153, 157, 445, 460, 467, and 482-487.

[2998] Embodiment 21. The method of embodiment 1, wherein the napDNAbp is an SpCas9 ortholog.

[2999] Embodiment 22. The method of embodiment 1, wherein the napDNAbp is any one of amino acid sequences SEQ ID NOs: 18-88, 126, 130, 137, 141, 147, 153, 157, 445, 460, 467, and 482-487, or an amino acid sequence having at least 80%, 85%, 90%, 95%, 98%, or 99% sequence identity with any of SEQ ID NOs: 18-88, 126, 130, 137, 141, 147, 153, 157, 445, 460, 467, and 482-487.

[3000] Embodiment 23. The method of embodiment 1, wherein the RNA-dependent DNA polymerase is a reverse transcriptase.

[3001] Embodiment 24. The method of embodiment 23, wherein the reverse transcriptase is a naturally occuring wild type reverse transcriptase having an amino acid sequence of any one of SEQ ID NOs: 89 or an amino acid sequence having at least 80%, 85%, 90%, 95%, 98%, or 99% sequence identity with any of SEQ ID NOs: 89.

[3002] Embodiment 25. The method of embodiment 23, wherein the reverse transcriptase is a variant reverse transcriptase having an amino acid sequence of any one of SEQ ID NOs: 89-100, 105-122, 128-129, 132, 139, 143, 149, 154, 159, 235, 454, 471, 516, 662, 700, 701-716, 739-741, and 766 or an amino acid sequence having at least 80%, 85%, 90%, 95%, 98%, or 99% sequence identity with any of SEQ ID NOs: 89-100, 105-122, 128-129, 132, 139, 143, 149, 154, 159, 235, 454, 471, 516, 662, 700, 701-716, 739-741, and 766.

[3003] Embodiment 26. The method of embodiment 1, wherein the fusion protein comprises an amino acid sequence of any one of SEQ ID NOs: 123 and 134 (PE1, PE2), or an amino acid sequence having at least 80%, 85%, 90%, 95%, 98%, or 99% sequence identity with any of SEQ ID NOs:123 and 134 (PE1, PE2).

[3004] Embodiment 27. The method of embodiment 1, wherein the one or more constructs that encode the prime editor fusion protein and/or the PEgRNA further comprises one or more promoters which are inducible when cellular event occurs.

[3005] Embodiment 28. The method of embodiment 1, wherein the cellular event is marked by a stimulus received by the cell.

[3006] Embodiment 29. The method of embodiment 28, wherein the stimulus is a small molecule, a protein, a peptide, an amino acid, a metabolite, an inorganic molecule, an organometallic molecule, an organic molecule, a drug or drug candidate, a sugar, a lipid, a metal, a nucleic acid, a molecule produced during the activation of an endogenous or an exogenous signaling cascade, light, heat, sound, pressure, mechanical stress, shear stress, or a virus or other microorganism, change in pH, or change in oxidation/reduction state.

[3007] Embodiment 30. A cell data recording plasmid for recording a cellular event using prime editing, comprising:

[3008] i. a fusion protein comprising (a) a nucleic acid sequence encoding a nucleic acid programmable DNA binding protein (napDNAbp) and a (b) RNA-dependent DNA polymerase, said fusion protein being operably linked to a first promoter;

[3009] ii. a nucleic acid sequence encoding a prime editor guide RNA (PEgRNA) operably linked to a second promoter, wherein the PEgRNA is complementary to a target sequence; and

[3010] iii. an origin of replication;

[3011] wherein at least one of the promoters is an inducible promoter, and wherein the PEgRNA associates with the napDNAbp under conditions that induce expression of the PEgRNA and expression of the napDNAbp sufficiently to install a detectable sequence at a target edit site.

[3012] Embodiment 31. The cell data recording plasmid of embodiment 30, wherein the inducible promoter is induced by the cellular event.

[3013] Embodiment 32. The cell data recording plasmid of embodiment 30, wherein the cellular event is marked by a stimulus received by the cell.

[3014] Embodiment 33. The cell data recording plasmid of embodiment 32, wherein the stimulus is a small molecule, a protein, a peptide, an amino acid, a metabolite, an inorganic molecule, an organometallic molecule, an organic molecule, a drug or drug candidate, a sugar, a lipid, a metal, a nucleic acid, a molecule produced during the activation of an endogenous or an exogenous signaling cascade, light, heat, sound, pressure, mechanical stress, shear stress, or a virus or other microorganism, change in pH, or change in oxidation/reduction state.

[3015] Embodiment 34. The cell data recording plasmid of embodiment 30, wherein the first and second promoter are the same.

[3016] Embodiment 35. The cell data recording plasmid of embodiment 30, wherein the first and second promoter are different.

[3017] Embodiment 36. The cell data recording plasmid of embodiment 30, wherein the at least one inducible promoter is an anhydrotetracycline-inducible promoter, IPTG-inducible promoter, rhamnose-inducible promoter, or arabinose-inducible promoter.

[3018] Embodiment 37. The cell data recording plasmid of embodiment 30, wherein the first or second promoter is a constitutive promoter.

[3019] Embodiment 38. The cell data recording plasmid of embodiment 37, wherein the constitutive promoter is a Lac promoter, cytomegalovirus (CMV) promoter, a constitutive RNA polymerase III promoter, or a UBC promoter.

[3020] Embodiment 39. The cell data recording plasmid of embodiment 30, wherein the origin of replication comprises a pSC101, pMB1, pBR322, ColE1, or p15A origin of replication sequence.

[3021] Embodiment 40. The cell data recording plasmid of embodiment 30, wherein the PEgRNA comprises an edit template that encodes the detectable sequence.

[3022] Embodiment 41. The cell data recording plasmid of embodiment 40, wherein the edit template further encodes a new target edit site.

[3023] Embodiment 42. The cell data recording plasmid of embodiment 30, wherein the detectable sequence is an insertion of at least 1, or at least 2, or at least 3, or at least 4, or at least 5, or at least 6, or at least 7, or at least 8, or at least 9, or at least 10, or at least 11, or at least 12, or at least 13, or at least 14, or at least 15, or at least 16, or at least 17, or at least 18, or at least 19, or at least 20, or at least 21, or at least 22, or at least 23, or at least 24, or at least 25, or at least 26, or at least 27, or at least 28, or at least 29, or at least 30, or at least 31, or at least 32, or at least 33, or at least 34, or at least 35, or at least 40, or at least 50, or at least 60, or at least 70, or at least 80, or at least 90, or at least 100 nucleobases.

[3024] Embodiment 43. The cell data recording plasmid of embodiment 30, wherein the detectable sequence is a deletion of at least 1, or at least 2, or at least 3, or at least 4, or at least 5, or at least 6, or at least 7, or at least 8, or at least 9, or at least 10, or at least 11, or at least 12, or at least 13, or at least 14, or at least 15, or at least 16, or at least 17, or at least 18, or at least 19, or at least 20, or at least 21, or at least 22, or at least 23, or at least 24, or at least 25, or at least 26, or at least 27, or at least 28, or at least 29, or at least 30, or at least 31, or at least 32, or at least 33, or at least 34, or at least 35, or at least 40, or at least 50, or at least 60, or at least 70, or at least 80, or at least 90, or at least 100 nucleobases.

[3025] Embodiment 44. The cell data recording plasmid of embodiment 30, wherein the detectable sequence is a nucleobase substitution.

[3026] Embodiment 45. The cell data recording plasmid of embodiment 30, wherein the detectable sequence is a transition mutation.

[3027] Embodiment 46. The cell data recording plasmid of embodiment 30, wherein the detectable sequence is a transversion mutation.

[3028] Embodiment 47. The cell data recording plasmid of embodiment 30, wherein the detectable sequence is a single nucleotide substitution of wherein the single nucleotide substitution is (1) a G to T substitution, (2) a G to A substitution, (3) a G to C substitution, (4) a T to G substitution, (5) a T to A substitution, (6) a T to C substitution, (7) a C to G substitution, (8) a C to T substitution, (9) a C to A substitution, (10) an A to T substitution, (11) an A to G substitution, or (12) an A to C substitution.

[3029] Embodiment 48. The cell data recording plasmid of embodiment 30, wherein the detectable sequence is a single nucleotide substitution that converts (1) a G:C basepair to a T:A basepair, (2) a G:C basepair to an A:T basepair, (3) a G:C basepair to C:G basepair, (4) a

[3030] T:A basepair to a G:C basepair, (5) a T:A basepair to an A:T basepair, (6) a T:A basepair to a C:G basepair, (7) a C:G basepair to a G:C basepair, (8) a C:G basepair to a T:A basepair, (9) a C:G basepair to an A:T basepair, (10) an A:T basepair to a T:A basepair, (11) an A:T basepair to a G:C basepair, or (12) an A:T basepair to a C:G basepair.

[3031] Embodiment 49. The cell data recording plasmid of embodiment 30, wherein the detectable sequence is a barcode sequence.

[3032] Embodiment 50. The cell data recording plasmid of embodiment 30, wherein the detectable sequence increases in length over time as a result of iterative insertion of the detectable sequence for each occurrence of the cellular event.

[3033] Embodiment 51. The cell data recording plasmid of embodiment 30, wherein the detecting step comprises sequencing the edited target site, or an amplicon of the edited target site.

[3034] Embodiment 52. The cell data recording plasmid of embodiment 30, wherein the napDNAbp is Cas9, Cas12e, Cas12d, Cas12a, Cas12b1, Cas13a, Cas12c, or Argonaute, or a variant of Cas9, Cas12e, Cas12d, Cas12a, Cas12b1, Cas13a, Cas12c, or Argonaute.

[3035] Embodiment 53. The cell data recording plasmid of embodiment 30, wherein the napDNAbp is a Cas9 or variant thereof.

[3036] Embodiment 54. The cell data recording plasmid of embodiment 30, wherein the napDNAbp is a nuclease active Cas9, a nuclease inactive Cas9 (dCas9), or a Cas9 nickase (nCas9).

[3037] Embodiment 55. The cell data recording plasmid of embodiment 30, wherein the napDNAbp is Cas9 nickase (nCas9).

[3038] Embodiment 56. The cell data recording plasmid of embodiment 30, wherein the napDNAbp comprises the amino acid sequence of SEQ ID NO: 18, or an amino acid sequence having at least 80%, 85%, 90%, 95%, 98%, or 99% sequence identity with SEQ ID NO: 18.

[3039] Embodiment 57. The cell data recording plasmid of embodiment 30, wherein the napDNAbp is SpCas9 wild type or a variant thereof of any one of amino acid sequences SEQ ID NOs: 18-88, 126, 130, 137, 141, 147, 153, 157, 445, 460, 467, and 482-487, or an amino acid sequence having at least 80%, 85%, 90%, 95%, 98%, or 99% sequence identity with any of SEQ ID NOs: 18-88, 126, 130, 137, 141, 147, 153, 157, 445, 460, 467, and 482-487.

[3040] Embodiment 58. The cell data recording plasmid of embodiment 30, wherein the napDNAbp is an SpCas9 ortholog.

[3041] Embodiment 59. The cell data recording plasmid of embodiment 30, wherein the napDNAbp is any one of amino acid sequences SEQ ID NOs: 18-88, 126, 130, 137, 141, 147, 153, 157, 445, 460, 467, and 482-487, or an amino acid sequence having at least 80%, 85%, 90%, 95%, 98%, or 99% sequence identity with any of SEQ ID NOs: 18-88, 126, 130, 137, 141, 147, 153, 157, 445, 460, 467, and 482-487.

[3042] Embodiment 60. The cell data recording plasmid of embodiment 30, wherein the RNA-dependent DNA polymerase is a reverse transcriptase.

[3043] Embodiment 61. The cell data recording plasmid of embodiment 30, wherein the reverse transcriptase is a naturally occuring wild type reverse transcriptase having an amino acid sequence of any one of SEQ ID NOs: 89 or an amino acid sequence having at least 80%, 85%, 90%, 95%, 98%, or 99% sequence identity with any of SEQ ID NOs: 89.

[3044] Embodiment 62. The cell data recording plasmid of embodiment 30, wherein the reverse transcriptase is a variant reverse transcriptase having an amino acid sequence of any one of SEQ ID NOs: 89-100, 105-122, 128-129, 132, 139, 143, 149, 154, 159, 235, 454, 471, 516, 662, 700, 701-716, 739-741, and 766 or an amino acid sequence having at least 80%, 85%, 90%, 95%, 98%, or 99% sequence identity with any of SEQ ID NOs: 89-100, 105-122, 128-129, 132, 139, 143, 149, 154, 159, 235, 454, 471, 516, 662, 700, 701-716, 739-741, and 766.

[3045] Embodiment 63. The cell data recording plasmid of embodiment 30, wherein the fusion protein comprises an amino acid sequence of any one of SEQ ID NOs: 123 and 134 (PE1, PE2), or an amino acid sequence having at least 80%, 85%, 90%, 95%, 98%, or 99% sequence identity with any of SEQ ID NOs: 123 and 134 (PE1, PE2).

[3046] Embodiment 64. A kit for use in a cell comprising the cell data recorder plasmid of any one of embodiments 30 63.

[3047] Embodiment 65. The kit of embodiment 64, wherein the cell is a prokaryotic cell.

[3048] Embodiment 66. The kit of embodiment 64, wherein the cell is a eukaryotic cell.

[3049] Embodiment 67. A cell comprising the cell data recording plasmid of any one of embodiments 30-63.

[3050] Embodiment 68. The cell of embodiment 67, wherein the cell is a prokaryotic cell.

[3051] Embodiment 69. The cell of embodiment 67, wherein the cell is a eukaryotic cell.

[3052] Embodiment 70. The cell of embodiment 69, wherein the eukaryotic cell is a mammalian cell.

[3053] Embodiment 71. The cell of embodiment 70, wherein the mammalian cell is a human cell.

[3054] Embodiment 72. A method of recording a cellular event by prime editing, the method comprising: (A) introducing into a cell a cell data recording plasmid of any of embodiments 30-63, wherein the fusion protein and/or the PEgRNA are induced by the occurrence of a cellular event, and wherein expression of the fusion protein and/or the PEgRNA results in prime editing of a target edit site in the genome of the cell to introduce a detectable sequence, and (B) identifying the detectable sequence, thereby identifying the occurrence of the cellular event.

[3055] Embodiment 73. The method of embodiment 72, wherein the step of (A) introducing is by transfection or electroporation.

### Equivalents and Scope

[3056] In the articles such as “a,” “an,” and “the” may mean one or more than one unless indicated to the contrary or otherwise evident from the context. Embodiments or descriptions that include “or” between one or more members of a group are considered satisfied if one, more than one, or all of the group members are present in, employed in, or otherwise relevant to a given product or process unless indicated to the contrary or otherwise evident from the context. The invention includes embodiments in which exactly one member of the group is present in, employed in, or otherwise relevant to a given product or process. The invention includes embodiments in which more than one, or all of the group members are present in, employed in, or otherwise relevant to a given product or process.

[3057] Furthermore, the disclosure encompasses all variations, combinations, and permutations in which one or more limitations, elements, clauses, and descriptive terms from one or more of the listed claims is introduced into another claim. For example, any claim that is dependent on another claim can be modified to include one or more limitations found in any other claims that is dependent on the same base claim. Where elements are presented as lists, e.g., in Markush group format, each subgroup of the elements is also disclosed, and any element(s) can be removed from the group. It should it be understood that, in general, where the invention, or aspects of the invention, is/are referred to as comprising particular elements and/or features, certain embodiments of the disclosure or aspects of the disclosure consist, or consist essentially of, such elements and/or features. For purposes of simplicity, those embodiments have not been specifically set forth in haec verba herein. It is also noted that the terms “comprising” and “containing” are intended to be open and permits the inclusion of additional elements or steps. Where ranges are given, endpoints are included. Furthermore, unless otherwise indicated or otherwise evident from the context and understanding of one of ordinary skill in the art, values that are expressed as ranges can assume any specific value or sub-range within the stated ranges in different embodiments of the invention, to the tenth of the unit of the lower limit of the range, unless the context clearly dictates otherwise.

[3058] This application refers to various issued patents, published patent applications, journal articles, and other publications, all of which are incorporated herein by reference. If there is a conflict between any of the incorporated references and the instant specification, the specification shall control. In addition, any particular embodiment of the present invention that falls within the prior art may be explicitly excluded from any one or more of the embodiments. Because such embodiments are deemed to be known to one of ordinary skill in the art, they may be excluded even if the exclusion is not set forth explicitly herein. Any particular embodiment of the invention can be excluded from any embodiment, for any reason, whether or not related to the existence of prior art.

[3059] Those skilled in the art will recognize or be able to ascertain using no more than routine experimentation many equivalents to the specific embodiments described herein. The scope of the present embodiments described herein is not intended to be limited to the above Description, but rather is as set forth in the appended embodiments. Those of ordinary skill in the art will appreciate that various changes and modifications to this description may be made without departing from the spirit or scope of the present invention, as defined in the following embodiments.

What is claimed is:

1. A method for installing a desired nucleotide change in a double-stranded DNA sequence, the method comprising: contacting the double-stranded DNA sequence with a complex comprising a fusion protein and a PEgRNA, wherein the fusion protein comprises a napDNAbp and a polymerase, and wherein the PEgRNA comprises a DNA synthesis template comprising the desired nucleotide change and a primer binding site;
thereby nicking the double-stranded DNA sequence, thereby generating a free single-strand DNA having a 3′ end;
thereby hybridizing the 3′ end of the free single-strand DNA to the primer binding site, thereby priming the polymerase;
thereby polymerizing a strand of DNA from the 3′ end hybridized to the primer binding site, thereby generating a single-strand DNA flap comprising the desired nucleotide change and which is complementary to the DNA synthesis template;
thereby replacing an endogenous DNA strand adjacent the cut site with the single-strand DNA flap, thereby installing the desired nucleotide change in the double-stranded DNA sequence.

2. The method of claim 1, wherein replacing an endogenous DNA strand comprises: (i) hybridizing the single-strand DNA flap to the endogenous DNA strand adjacent the cut site to create a sequence mismatch; (ii) excising the endogenous DNA strand; and (iii) repairing the mismatch to form the desired product comprising the desired nucleotide change in both strands of DNA.

3. The method of claim 1, wherein the desired nucleotide change is a single nucleotide substitution, a deletion, or an insertion.

4. The method of claim 3, wherein the single nucleotide substitution is a transition or a transversion.

5. The method of claim 1, wherein the desired nucleotide change is (1) a G to T substitution, (2) a G to A substitution, (3) a G to C substitution, (4) a T to G substitution, (5) a T to A substitution, (6) a T to C substitution, (7) a C to G substitution, (8) a C to T substitution, (9) a C to A substitution, (10) an A to T substitution, (11) an A to G substitution, or (12) an A to C substitution.

6. The method of claim 1, wherein the desired nucleotide change converts (1) a G:C basepair to a T:A basepair, (2) a G:C basepair to an A:T basepair, (3) a G:C basepair to C:G basepair, (4) a T:A basepair to a G:C basepair, (5) a T:A basepair to an A:T basepair, (6) a T:A basepair to a C:G basepair, (7) a C:G basepair to a G:C basepair, (8) a C:G basepair to a T:A basepair, a C:G basepair to an A:T basepair, (10) an A:T basepair to a T:A basepair, (11) an A:T basepair to a G:C basepair, or (12) an A:T basepair to a C:G basepair.

7. The method of claim 1, wherein the desired nucleotide change is an insertion or deletion of 1, 2, 3, 4, 5, 6, 7, 8, 9, 10, 11, 12, 13, 14, 15, 16, 17, 18, 19, 20, 21, 22, 23, 24, or 25 nucleotides.

8. The method of claim 1, wherein the desired nucleotide change corrects a disease-associated gene.

9. The method of claim 8, wherein the disease-associated gene is associated with a monogentic disorder selected from the group consisting of: Adenosine Deaminase (ADA) Deficiency; Alpha-1 Antitrypsin Deficiency; Cystic Fibrosis; Duchenne Muscular Dystrophy; Galactosemia; Hemochromatosis; Huntington's Disease; Maple Syrup Urine Disease; Marfan Syndrome; Neurofibromatosis Type 1; Pachyonychia Congenita; Phenylkeotnuria; Severe Combined Immunodeficiency; Sickle Cell Disease; Smith-Lemli-Opitz Syndrome; a trinucleotide repeat disorder; a prion disease; and Tay-Sachs Disease.

10. The method of claim 8, wherein the disease-associated gene is associated with a polygenic disorder selected from the group consisting of: heart disease; high blood pressure; Alzheimer's disease; arthritis; diabetes; cancer; and obesity.

11. The method of claim 1, wherein the napDNAbp is a nuclease dead Cas9 (dCas9), a Cas9 nickase (nCas9), or a nuclease active Cas9.

12. The method of claim 1, wherein the napDNAbp comprises an amino acid sequence of SEQ ID NO: 18.

13. The method of claim 1, wherein the napDNAbp comprises an amino acid sequence having at least 80%, 85%, 90%, 95%, 98%, or 99% sequence identity with the amino acid sequence of any one of SEQ ID NOs: 18-88, 126, 130, 137, 141, 147, 153, 157, 445, 460, 467, and 482-487.

14. The method of claim 1, wherein the polymerase is a reverse transcriptase comprising any one of the amino acid sequences of SEQ ID NO: 89-100, 105-122, 128-129, 132, 139, 143, 149, 154, 159, 235, 454, 471, 516, 662, 700, 701-716, 739-741, and 766.

15. The method of claim 1, wherein the polymerase is a reverse transcriptase comprising an amino acid sequence having at least 80%, 85%, 90%, 95%, 98%, or 99% sequence identity with the amino acid sequence of any one of SEQ ID NOs: 89-100, 105-122, 128-129, 132, 139, 143, 149, 154, 159, 235, 454, 471, 516, 662, 700, 701-716, 739-741, and 766.

16. The method of claim 1, wherein the PEgRNA comprises a nucleic acid extension arm at the 3′ or 5′ ends or at an intramolecular location in the guide RNA, wherein the extension arm comprises the DNA synthesis template sequence and the primer binding site.

17. The method of claim 16, wherein the extension arm is at least 5 nucleotides, at least 6 nucleotides, at least 7 nucleotides, at least 8 nucleotides, at least 9 nucleotides, at least 10 nucleotides, at least 11 nucleotides, at least 12 nucleotides, at least 13 nucleotides, at least 14 nucleotides, at least 15 nucleotides, at least 16 nucleotides, at least 17 nucleotides, at least 18 nucleotides, at least 19 nucleotides, at least 20 nucleotides, at least 21 nucleotides, at least 22 nucleotides, at least 23 nucleotides, at least 24 nucleotides, or at least 25 nucleotides in length.

18. The method of claim 1, wherein the PEgRNA has a nucleotide sequence selected from the group consisting of SEQ ID NOs: 101-104, 181-183, 223-244, 277, 325-334, 336, 338, 340, 342, 344, 346, 348, 350, 352, 354, 356, 358, 360, 362, 364, 366, 368, 499-505, 735-761, 776-777.

19. A method for introducing one or more changes in the nucleotide sequence of a DNA molecule at a target locus, comprising: contacting the DNA molecule with a nucleic acid programmable DNA binding protein (napDNAbp) and a PEgRNA which targets the napDNAbp to the target locus, wherein the PEgRNA comprises a reverse transcriptase (RT) template sequence comprising at least one desired nucleotide change and a primer binding site;
thereby forming an exposed 3′ end in a DNA strand at the target locus;
thereby hybridizing the exposed 3′ end to the primer binding site to prime reverse transcription;
thereby synthesizing a single strand DNA flap comprising the at least one desired nucleotide change based on the RT template sequence by reverse transcriptase;
thereby incorporating the at least one desired nucleotide change into the corresponding endogenous DNA, thereby introducing one or more changes in the nucleotide sequence of the DNA molecule at the target locus.

20. The method of claim 19, wherein the one or more changes in the nucleotide sequence comprises a transition.

21. The method of claim 19, wherein the transition is selected from the group consisting of: (a) T to C; (b) A to G; (c) C to T; and (d) G to A.

22. The method of claim 19, wherein the one or more changes in the nucleotide sequence comprises a transversion.

23. The method of claim 22, wherein the transversion is selected from the group consisting of: (a) T to A; (b) T to G; (c) C to G; (d) C to A; (e) A to T; (f) A to C; (g) G to C; and (h) G to T.

24. The method of claim 19, wherein the one or more changes in the nucleotide sequence comprises changing (1) a G:C basepair to a T:A basepair, (2) a G:C basepair to an A:T basepair, (3) a G:C basepair to C:G basepair, (4) a T:A basepair to a G:C basepair, (5) a T:A basepair to an A:T basepair, (6) a T:A basepair to a C:G basepair, (7) a C:G basepair to a G:C basepair, (8) a C:G basepair to a T:A basepair, (9) a C:G basepair to an A:T basepair, (9) an A:T basepair to a T:A basepair, (11) an A:T basepair to a G:C basepair, or (12) an A:T basepair to a C:G basepair.

25. The method of claim 19, wherein the one or more changes in the nucleotide sequence comprises an insertion or deletion of 1, 2, 3, 4, 5, 6, 7, 8, 9, 10, 11, 12, 13, 14, 15, 16, 17, 18, 19, 20, 21, 22, 23, 24, or 25 nucleotides.

26. The method of claim 19, wherein the one or more changes in the nucleotide sequence comprises a correction to a disease-associated gene.

27. The method of claim 26, wherein the disease-associated gene is associated with a monogentic disorder selected from the group consisting of: Adenosine Deaminase (ADA) Deficiency; Alpha-1 Antitrypsin Deficiency; Cystic Fibrosis; Duchenne Muscular Dystrophy; Galactosemia; Hemochromatosis; Huntington's Disease; Maple Syrup Urine Disease; Marfan Syndrome; Neurofibromatosis Type 1; Pachyonychia Congenita; Phenylkeotnuria; Severe Combined Immunodeficiency; Sickle Cell Disease; Smith-Lemli-Opitz Syndrome; a trinucleotide repeat disorder; a prion disease; and Tay-Sachs Disease.

28. The method of claim 26, wherein the disease-associated gene is associated with a polygenic disorder selected from the group consisting of: heart disease; high blood pressure; Alzheimer's disease; arthritis; diabetes; cancer; and obesity.

29. The method of claim 19, wherein the napDNAbp is a nuclease active Cas9 or variant thereof.

30. The method of claim 19, wherein the napDNAbp is a nuclease inactive Cas9 (dCas9) or Cas9 nickase (nCas9), or a variant thereof.

31. The method of claim 19, wherein the napDNAbp comprises an amino acid sequence of SEQ ID NO: 18.

32. The method of claim 19, wherein the napDNAbp comprises an amino acid sequence having at least 80%, 85%, 90%, 95%, 98%, or 99% sequence identity with the amino acid sequence of any one of SEQ ID NOs: 18-88, 126, 130, 137, 141, 147, 153, 157, 445, 460, 467, and 482-487.

33. The method of claim 19, wherein the reverse transcriptase is introduced in trans.

34. The method of claim 19, wherein the napDNAbp comprises a fusion to a reverse transcriptase.

35. The method of claim 19, wherein the reverse transcriptase comprises any one of the amino acid sequences of SEQ ID NO: 89-100, 105-122, 128-129, 132, 139, 143, 149, 154, 159, 235, 454, 471, 516, 662, 700, 701-716, 739-741, and 766.

36. The method of claim 19, wherein the reverse transcriptase comprises an amino acid sequence having at least 80%, 85%, 90%, 95%, 98%, or 99% sequence identity with the amino acid sequence of any one of SEQ ID NOs: 89-100, 105-122, 128-129, 132, 139, 143, 149, 154, 159, 235, 454, 471, 516, 662, 700, 701-716, 739-741, and 766.

37. The method of claim 19, wherein the step of forming an exposed 3′ end in the DNA strand at the target locus comprises nicking the DNA strand with a nuclease.

38. The method of claim 37, wherein the nuclease is the napDNAbp, is provided as a fusion domain of napDNAbp, or is provided in trans.

39. The method of claim 19, wherein the step of forming an exposed 3′ end in the DNA strand at the target locus comprises contacting the DNA strand with a chemical agent.

40. The method of claim 19, wherein the step of forming an exposed 3′ end in the DNA strand at the target locus comprises introducing a replication error.

41. The method of claim 19, wherein the step of contacting the DNA molecule with the napDNAbp and the guide RNA forms an R-loop.

42. The method of claim 41, wherein the DNA strand in which the exposed 3′ end is formed is in the R-loop.

43. The method of claim 19, wherein the PEgRNA comprises an extension arm that comprises the reverse transcriptase (RT) template sequence and the primer binding site.

44. The method of claim 43, wherein the extension arm is at the 3′ end of the guide RNA, the 5′ end of the guide RNA, or at an intramolecular position in the guide RNA.

45. The method of claim 19, wherein the PEgRNA further comprises at least one additional structure selected from the group consisting of a linker, a stem loop, a hairpin, a toeloop, an aptamer, or an RNA-protein recruitment domain.

46. The method of claim 19, wherein the PEgRNA further comprises a homology arm.

47. The method of claim 19, wherein the RT template sequence is homologous to the corresponding endogenous DNA.

48. A method for introducing one or more changes in the nucleotide sequence of a DNA molecule at a target locus by target-primed reverse transcription, the method comprising: (a) contacting the DNA molecule at the target locus with a (i) fusion protein comprising a nucleic acid programmable DNA binding protein (napDNAbp) and a reverse transcriptase and (ii) a guide RNA comprising an RT template comprising a desired nucleotide change;
thereby conducting target-primed reverse transcription of the RT template to generate a single strand DNA comprising the desired nucleotide change;
thereby incorporating the desired nucleotide change into the DNA molecule at the target locus through a DNA repair and/or replication process.

49. The method of claim 48, wherein the RT template is located at the 3′ end of the guide RNA, the 5′ end of the guide RNA, or at an intramolecular location in the guide RNA.

50. The method of claim 48, wherein the desired nucleotide change comprises a transition, a transversion, an insertion, or a deletion, or any combination thereof.

51. The method of claim 48, wherein the desired nucleotide change comprises a transition selected from the group consisting of: (a) T to C; (b) A to G; (c) C to T; and (d) G to A.

52. The method of claim 48, wherein the desired nucleotide change comprises a transversion selected from the group consisting of: (a) T to A; (b) T to G; (c) C to G; (d) C to A; (e) A to T; (f) A to C; (g) G to C; and (h) G to T.

53. The method of claim 48, wherein the desired nucleotide change comprises changing (1) a G:C basepair to a T:A basepair, (2) a G:C basepair to an A:T basepair, (3) a G:C basepair to C:G basepair, (4) a T:A basepair to a G:C basepair, (5) a T:A basepair to an A:T basepair, (6) a T:A basepair to a C:G basepair, (7) a C:G basepair to a G:C basepair, (8) a C:G basepair to a T:A basepair, (9) a C:G basepair to an A:T basepair, (10) an A:T basepair to a T:A basepair, (11) an A:T basepair to a G:C basepair, or (12) an A:T basepair to a C:G basepair.

54. A method for replacing a trinucleotide repeat expansion mutation in a target DNA molecule with a healthy sequence comprising a healthy number of repeat trinucleotides, the method comprising: (a) contacting the DNA molecule at the target locus with a (i) fusion protein comprising a nucleic acid programmable DNA binding protein (napDNAbp) and a polymerase and (ii) a PEgRNA comprising DNA synthesis template comprising the replacement sequence and a primer binding site; (b) conducting prime editingto generate a single strand DNA comprising the replacement sequence; and (c) incorporating the single strand DNA into the DNA molecule at the target locus through a DNA repair and/or replication process.

55. The method of claim 54, wherein the fusion protein comprises the amino acid sequence of PE1, PE2, or PE3.

56. The method of claim 54, wherein the napDNAbp is a Cas9 nickase (nCas9).

57. The method of claim 54, wherein the napDNAbp comprises the amino acid sequence of SEQ ID NOs: 18-88, 126, 130, 137, 141, 147, 153, 157, 445, 460, 467, and 482-487.

58. The method of claim 54, wherein the guide RNA comprises SEQ ID NOs: 222.

59. The method of claim 54, wherein the step of (b) conducting prime editing comprises generating a 3′ end primer binding sequence at the target locus that is capable of priming polymerase by annealing to the primer binding site on the guide RNA.

60. The method of claim 54, wherein the trinucleotide repeat expansion mutation is associated with Huntington's Disease, Fragile X syndrome, or Friedreich's ataxia.

61. The method of claim 54, wherein the trinucleotide repeat expansion mutation comprises a repeating unit of CAG triplets.

62. The method of claim 54, wherein the trinucleotide repeat expansion mutation comprises a repeating unit of GAA triplets.

63. A method for introducing one or more changes in the nucleotide sequence of a DNA molecule at a target locus by target-primed reverse transcription, the method comprising: (a) contacting the DNA molecule at the target locus with a (i) fusion protein comprising a nucleic acid programmable DNA binding protein (napDNAbp) and a reverse transcriptase and (ii) a guide RNA comprising an RT template comprising a desired nucleotide change;
thereby conducting target-primed reverse transcription of the RT template to generate a single strand DNA comprising the desired nucleotide change;
thereby incorporating the desired nucleotide change into the DNA molecule at the target locus through a DNA repair and/or replication process.

64. The method of claim 63, wherein the RT template is located at the 3′ end of the guide RNA, the 5′ end of the guide RNA, or at an intramolecular location in the guide RNA.

65. The method of claim 63, wherein the desired nucleotide change comprises a transition, a transversion, an insertion, or a deletion, or any combination thereof.

66. The method of claim 63, wherein the desired nucleotide change comprises a transition selected from the group consisting of: (a) T to C; (b) A to G; (c) C to T; and (d) G to A.

67. The method of claim 63, wherein the desired nucleotide change comprises a transversion selected from the group consisting of: (a) T to A; (b) T to G; (c) C to G; (d) C to A; (e) A to T; (f) A to C; (g) G to C; and (h) G to T.

68. The method of claim 63, wherein the desired nucleotide change comprises changing (1) a G:C basepair to a T:A basepair, (2) a G:C basepair to an A:T basepair, (3) a G:C basepair to C:G basepair, (4) a T:A basepair to a G:C basepair, (5) a T:A basepair to an A:T basepair, (6) a T:A basepair to a C:G basepair, (7) a C:G basepair to a G:C basepair, (8) a C:G basepair to a T:A basepair, (9) a C:G basepair to an A:T basepair, (10) an A:T basepair to a T:A basepair, (11) an A:T basepair to a G:C basepair, or (12) an A:T basepair to a C:G basepair.

69. A method of preventing or halting the progression of a prion disease by installing on or more protective mutations into PRNP encoded by a target nucleotide sequence by prime editing, the method comprising: (a) contacting the target nucleotide sequence with a (i) prime editor comprising a nucleic acid programmable DNA binding protein (napDNAbp) and a polymerase and (ii) a PEgRNA comprising an edit template encoding the functional moiety;
thereby polymerizing a single strand DNA sequence encoding the protective mutation;
thereby incorporating the single strand DNA sequence in place of a corresponding endogenous strand at the target nucleotide sequence through a DNA repair and/or replication process;
wherein the method produces a recombinant target nucleotide sequence that encodes a PRNP comprising a protective mutation and which is resistant to misfolding.

70. The method of claim 69, wherein the prion disease is a human prion disease.

71. The method of claim 69, wherein the prion disease is an animal prion disease.

72. The method of claim 69, wherein the prion disease is Creutzfeldt-Jakob Disease (CJD), Variant Creutzfeldt-Jakob Disease (νCJD), Gerstmann-Straussler-Scheinker Syndrome, Fatal Familial Insomnia, or Kuru.

73. The method of claim 69, wherein the prion disease is Bovine Spongiform Encephalopathy (BSE or “mad cow disease”), Chronic Wasting Disease (CWD), Scrapie, Transmissible Mink Encephalopathy, Feline Spongiform Encephalopathy, and Ungulate Spongiform Encephalopathy.

74. The method of claim 69, wherein the wildtype PRNP amino acid sequence is SEQ ID NOs: 291-292.

75. The method of claim 69, wherein the method results in a modified PRNP amino acid sequence selected from the group consisting of SEQ ID NOs: 293-309, 311-323, wherein said modified PRNP protein is resistant to misfolding.

76. The method of claim 69, wherein the fusion protein comprises the amino acid sequence of PE1, PE2, or PE3.

77. The method of claim 69, wherein the napDNAbp is a Cas9 nickase (nCas9).

78. The method of claim 69, wherein the napDNAbp comprises the amino acid sequence of SEQ ID NOs: 18-88, 126, 130, 137, 141, 147, 153, 157, 445, 460, 467, and 482-487.

79. The method of claim 69, wherein the PEgRNA comprises SEQ ID NOs: 101-104, 181-183, 223-244, 277, 325-334, 336, 338, 340, 342, 344, 346, 348, 350, 352, 354, 356, 358, 360, 362, 364, 366, 368, 499-505, 735-761, 776-777.

80. A method of treating CDKL5 Deficiency Disorder by correcting a mutation in the cyclin-dependent kinase-like 5 gene (CDKL5) in a target nucleotide sequence by prime editing, the method comprising: (a) contacting the target nucleotide sequence with a (i) prime editor comprising a nucleic acid programmable DNA binding protein (napDNAbp) and a polymerase and (ii) a PEgRNA comprising an edit template that corrects the mutation in CDKL5;
thereby polymerizing a single strand DNA sequence encoding the edit;
thereby incorporating the single strand DNA sequence in place of a corresponding endogenous strand at the target nucleotide sequence through a DNA repair and/or replication process;
wherein the method produces a recombinant target nucleotide sequence that encodes a repaired CDKL5 gene.

81. The method of claim D80, wherein the mutation in CDKL5 is 1412delA.

The application's sequence listing, which the Patent Office published only in electronic form, follows.

SEQUENCE LISTING (4084 sequences)

SEQ ID NO: 1 - protein, 12 aa, synthetic construct
  REGION 1..12: note = Synthetic
FLNCCPGCCMEP

SEQ ID NO: 2 - protein, 8 aa, synthetic construct
  REGION 1..8: note = Synthetic
DYKDDDDK

SEQ ID NO: 3 - protein, 14 aa, synthetic construct
  REGION 1..14: note = Synthetic
GKPIPNPLLGLDST

SEQ ID NO: 4 - protein, 19 aa, synthetic construct
  REGION 1..19: note = Synthetic
EELLSKNYHLENEVARLKK

SEQ ID NO: 5 - protein, 9 aa, synthetic construct
  REGION 1..9: note = Synthetic
YPYDVPDYA

SEQ ID NO: 6 - protein, 10 aa, synthetic construct
  REGION 1..10: note = Synthetic
EQKLISEEDL

SEQ ID NO: 7 - protein, 380 aa, Homo sapiens
MGIQGLAKLIADVAPSAIRENDIKSYFGRKVAIDASMSIYQFLIAVRQGGDVLQNEEGETTSHLMGMFYRTIRMMENGIKPVYVFDGKPPQLKSGELAKRSERRAEAEKQLQQAQAAGAEQEVEKFTKRLVKVTKQHNDECKHLLSLMGIPYLDAPSEAEASCAALVKAGKVYAAATEDMDCLTFGSPVLMRHLTASEAKKLPIQEFHLSRILQELGLNQEQFVDLCILLGSDYCESIRGIGPKRAVDLIQKHKSIEEIVRRLDPNKYPVPENWLHKEAHQLFLEPEVLDPESVELKWSEPNEEELIKFMCGEKQFSEERIRSGVKRLSKSRQGSTQGRLDDFFKVTGSLSSAKRKEPEPKGSTKKKAKTGAAGKFKRGK

SEQ ID NO: 8 - protein, 413 aa, synthetic construct
  REGION 1..413: note = Synthetic
CLAEGTRIFDPVTGTTHRIEDVVDGRKPIHVVAAAKDGTLLARPVVSWFDQGTRDVIGLRIAGGAIVWATPDHKVLTEYGWRAAGELRKGDRVAGPGGSGNSLALSLTADQMVSALLDAEPPILYSEYDPTSPFSEASMMGLLTNLADRELVHMINWAKRVPGFVDLTLHDQAHLLECAWLEILMIGLVWRSMEHPGKLLFAPNLLLDRNQGKCVEGMVEIFDMLLATSSRFRMMNLQGEEFVCLKSIILLNSGVYTFLSSTLKSLEEKDHIHRALDKITDTLIHLMAKAGLTLQQQHQRLAQLLLILSHIRHMSNKGMEHLYSMKYKNVVPLYDLLLEMLDAHRLHAGGSGASRVQAFADALDDKFLHDMLAEELRYSVIREVLPTRRARTFDLEVEELHTLVAEGVVVHNC

SEQ ID NO: 9 - protein, 413 aa, synthetic construct
  REGION 1..413: note = Synthetic
CLAEGTRIFDPVTGTTHRIEDVVDGRKPIHVVAVAKDGTLLARPVVSWFDQGTRDVIGLRIAGGAIVWATPDHKVLTEYGWRAAGELRKGDRVAGPGGSGNSLALSLTADQMVSALLDAEPPILYSEYDPTSPFSEASMMGLLTNLADRELVHMINWAKRVPGFVDLTLHDQAHLLECAWLEILMIGLVWRSMEHPGKLLFAPNLLLDRNQGKCVEGMVEIFDMLLATSSRFRMMNLQGEEFVCLKSIILLNSGVYTFLSSTLKSLEEKDHIHRALDKITDTLIHLMAKAGLTLQQQHQRLAQLLLILSHIRHMSNKGMEHLYSMKYTNVVPLYDLLLEMLDAHRLHAGGSGASRVQAFADALDDKFLHDMLAEELRYSVIREVLPTRRARTFDLEVEELHTLVAEGVVVHNC

SEQ ID NO: 10 - protein, 413 aa, synthetic construct
  REGION 1..413: note = Synthetic
CLAEGTRIFDPVTGTTHRIEDVVDGRKPIHVVAAAKDGTLLARPVVSWFDQGTRDVIGLRIAGGATVWATPDHKVLTEYGWRAAGELRKGDRVAGPGGSGNSLALSLTADQMVSALLDAEPPIPYSEYDPTSPFSEASMMGLLTNLADRELVHMINWAKRVPGFVDLTLHDQAHLLECAWLEILMIGLVWRSMEHPGKLLFAPNLLLDRNQGKCVEGMVEIFDMLLATSSRFRMMNLQGEEFVCLKSIILLNSGVYTFLSSTLKSLEEKDHIHRALDKITDTLIHLMAKAGLTLQQQHQRLAQLLLILSHIRHMSNKGMEHLYSMKYKNVVPLYDLLLEMLDAHRLHAGGSGASRVQAFADALDDKFLHDMLAEGLRYSVIREVLPTRRARTFDLEVEELHTLVAEGVVVHNC

SEQ ID NO: 11 - protein, 413 aa, synthetic construct
  REGION 1..413: note = Synthetic
CLAEGTRIFDPVTGTTHRIEDVVDGRKPIHVVAAAKDGTLLARPVVSWFDQGTRDVIGLRIAGGATVWATPDHKVLTEYGWRAAGELRKGDRVAGPGGSGNSLALSLTADQMVSALLDAEPPILYSEYDPTSPFSEASMMGLLTNLADRELVHMINWAKRVPGFVDLTLHDQAHLLECAWLEILMIGLVWRSMEHPGKLLFAPNLLLDRNQGKCVEGMVEIFDMLLATSSRFRMMNLQGEEFVCLKSIILLNSGVYTFLSSTLKSLEEKDHIHRALDKITDTLIHLMAKAGLTLQQQHQRLAQLLLILSHIRHMSNKGMEHLYSMKYKNVVPLYDLLLEMLDAHRLHAGGSGASRVQAFADALDDKFLHDMLAEELRYSVIREVLPTRRARTFDLEVEELHTLVAEGVVVHNC

SEQ ID NO: 12 - protein, 413 aa, synthetic construct
  REGION 1..413: note = Synthetic
CLAEGTRIFDPVTGTTHRIEDVVDGRKPIHVVAAAKDGTLLARPVVSWFDQGTRDVIGLRIAGGATVWATPDHKVLTEYGWRAAGELRKGDRVAGPGGSGNSLALSLTADQMVSALLDAEPPIPYSEYDPTSPFSEASMMGLLTNLADRELVHMINWAKRVPGFVDLTLHDQAHLLECAWLEILMIGLVWRSMEHPGKLLFAPNLLLDRNQGKCVEGMVEIFDMLLATSSRFRMMNLQGEEFVCLKSIILLNSGVYTFLSSTLKSLEEKDHIHRALDKITDTLIHLMAKAGLTLQQQHQRLAQLLLILSHIRHMSNKGMEHLYSMKYKNVVPLYDLLLEMLDAHRLHAGGSGASRVQAFADALDDKFLHDMLAEELRYSVIREVLPTRRARTFDLEVEELHTLVAEGVVVHNC

SEQ ID NO: 13 - protein, 413 aa, synthetic construct
  REGION 1..413: note = Synthetic
CLAEGTRIFDPVTGTTHRIEDVVDGRKPIHVVAAAKDGTLLARPVVSWFDQGTRDVIGLRIAGGATVWATPDHKVLTEYGWRAAGELRKGDRVAGPGGSGNSLALSLTADQMVSALLDAEPPILYSEYNPTSPFSEASMMGLLTNLADRELVHMINWAKRVPGFVDLTLHDQAHLLERAWLEILMIGLVWRSMEHPGKLLFAPNLLLDRNQGKCVEGMVEIFDMLLATSSRFRMMNLQGEEFVCLKSIILLNSGVYTFLSSTLKSLEEKDHIHRALDKITDTLIHLMAKAGLTLQQQHQRLAQLLLILSHIRHMSNKGMEHLYSMKYKNVVPLYDLLLEMLDAHRLHAGGSGASRVQAFADALDDKFLHDMLAEGLRYSVIREVLPTRRARTFDLEVEELHTLVAEGVVVHNC

SEQ ID NO: 14 - protein, 413 aa, synthetic construct
  REGION 1..413: note = Synthetic
CLAEGTRIFDPVTGTTHRIEDVVDGRKPIHVVAAAKDGTLLARPVVSWFDQGTRDVIGLRIAGGAIVWATPDHKVLTEYGWRAAGELRKGDRVAGPGGSGNSLALSLTADQMVSALLDAEPPILYSEYDPTSPFSEASMMGLLTNLADRELVHMINWAKRVPGFVDLTLHDQAHLLERAWLEILMIGLVWRSMEHPGKLLFAPNLLLDRNQGKCVEGMVEIFDMLLATSSRFRMMNLQGEEFVCLKSIILLNSGVYTFLSSTLKSLEEKDHIHRALDKITDTLIHLMAKAGLTLQQQHQRLAQLLLILSHIRHMSNKGMEHLYSMKYKNVVPLYDLLLEMLDAHRLHAGGSGASRVQAFADALDDKFLHDMLAEGLRYSVIREVLPTRRARTFDLEVEELHTLVAEGVVVHNC

SEQ ID NO: 15 - protein, 413 aa, synthetic construct
  REGION 1..413: note = Synthetic
CLAEGTRIFDPVTGTTHRIEDVVDGRKPIHVVAVAKDGTLLARPVVSWFDQGTRDVIGLRIAGGATVWATPDHKVLTEYGWRAAGELRKGDRVAGPGGSGNSLALSLTADQMVSALLDAEPPILYSEYDPTSPFSEASMMGLLTNLADRELVHMINWAKRVPGFVDLTLHDQAHLLERAWLEILMIGLVWRSMEHPGKLLFAPNLLLDRNQGKCVEGMVEIFDMLLATSSRFRMMNLQGEEFVCLKSIILLNSGVYTFLSSTLKSLEEKDHIHRALDKITDTLIHLMAKAGLTLQQQHQRLAQLLLILSHIRHMSNKGMEHLYSMKYKNVVPLYDLLLEMLDAHRLHAGGSGASRVQAFADALDDKFLHDMLAEELRYSVIREVLPTRRARTFDLEVEELHTLVAEGVVVHNC

SEQ ID NO: 16 - protein, 7 aa, synthetic construct
  REGION 1..7: note = Synthetic
PKKKRKV

SEQ ID NO: 17 - protein, 30 aa, synthetic construct
  REGION 1..30: note = Synthetic
MDSLLMNRRKFLYQFKNVRWAKGRRETYLC

SEQ ID NO: 18 - protein, 1368 aa, Streptococcus pyogenes [sequence omitted]

SEQ ID NO: 19 - DNA, 4104 bp, Streptococcus pyogenes
  source 1..4104: mol_type = genomic DNA
atggataaaaaatatagcattggcctggatattggcaccaacagcgtgggctgggcggtgattaccgatgaatataaagtgccgagcaaaaaatttaaagtgctgggcaacaccgatcgccatagcattaaaaaaaacctgattggcgcgctgctgtttgatagcggcgaaaccgcggaagcgacccgcctgaaacgcaccgcgcgccgccgctatacccgccgcaaaaaccgcatttgctatctgcaggaaatttttagcaacgaaatggcgaaagtggatgatagcttttttcatcgcctggaagaaagctttctggtggaagaagataaaaaacatgaacgccatccgatttttggcaacattgtggatgaagtggcgtatcatgaaaaatatccgaccatttatcatctgcgcaaaaaactggtggatagcaccgataaagcggatctgcgcctgatttatctggcgctggcgcatatgattaaatttcgcggccattttctgattgaaggcgatctgaacccggataacagcgatgtggataaactgtttattcagctggtgcagacctataaccagctgtttgaagaaaacccgattaacgcgagcggcgtggatgcgaaagcgattctgagcgcgcgcctgagcaaaagccgccgcctggaaaacctgattgcgcagctgccgggcgaaaaaaaaaacggcctgtttggcaacctgattgcgctgagcctgggcctgaccccgaactttaaaagcaactttgatctggcggaagatgcgaaactgcagctgagcaaagatacctatgatgatgatctggataacctgctggcgcagattggcgatcagtatgcggatctgtttctggcggcgaaaaacctgagcgatgcgattctgctgagcgatattctgcgcgtgaacaccgaaattaccaaagcgccgctgagcgcgagcatgattaaacgctatgatgaacatcatcaggatctgaccctgctgaaagcgctggtgcgccagcagctgccggaaaaatataaagaaattttttttgatcagagcaaaaacggctatgcgggctatattgatggcggcgcgagccaggaagaattttataaatttattaaaccgattctggaaaaaatggatggcaccgaagaactgctggtgaaactgaaccgcgaagatctgctgcgcaaacagcgcacctttgataacggcagcattccgcatcagattcatctgggcgaactgcatgcgattctgcgccgccaggaagatttttatccgtttctgaaagataaccgcgaaaaaattgaaaaaattctgacctttcgcattccgtattatgtgggcccgctggcgcgcggcaacagccgctttgcgtggatgacccgcaaaagcgaagaaaccattaccccgtggaactttgaagaagtggtggataaaggcgcgagcgcgcagagctttattgaacgcatgaccaactttgataaaaacctgccgaacgaaaaagtgctgccgaaacatagcctgctgtatgaatattttaccgtgtataacgaactgaccaaagtgaaatatgtgaccgaaggcatgcgcaaaccggcgtttctgagcggcgaacagaaaaaagcgattgtggatctgctgtttaaaaccaaccgcaaagtgaccgtgaaacagctgaaagaagattattttaaaaaaattgaatgctttgatagcgtggaaattagcggcgtggaagatcgctttaacgcgagcctgggcacctatcatgatctgctgaaaattattaaagataaagattttctggataacgaagaaaacgaagatattctggaagatattgtgctgaccctgaccctgtttgaagatcgcgaaatgattgaagaacgcctgaaaacctatgcgcatctgtttgatgataaagtgatgaaacagctgaaacgccgccgctataccggctggggccgcctgagccgcaaactgattaacggcattcgcgataaacagagcggcaaaaccattctggattttctgaaaagcgatggctttgcgaaccgcaactttatgcagctgattcatgatgatagcctgacctttaaagaagatattcagaaagcgcaggtgagcggccagggcgatagcctgcatgaacatattgcgaacctggcgggcagcccggcgattaaaaaaggcattctgcagaccgtgaaagtggtggatgaactggtgaaagtgatgggccgccataaaccggaaaacattgtgattgaaatggcgcgcgaaaaccagaccacccagaaaggccagaaaaacagccgcgaacgcatgaaacgcattgaagaaggcattaaagaactgggcagccagattctgaaagaacatccggtggaaaacacccagctgcagaacgaaaaactgtatctgtattatctgcagaacggccgcgatatgtatgtggatcaggaactggatattaaccgcctgagcgattatgatgtggatcatattgtgccgcagagctttctgaaagatgatagcattgataacaaagtgctgacccgcagcgataaaaaccgcggcaaaagcgataacgtgccgagcgaagaagtggtgaaaaaaatgaaaaactattggcgccagctgctgaacgcgaaactgattacccagcgcaaatttgataacctgaccaaagcggaacgcggcggcctgagcgaactggataaagcgggctttattaaacgccagctggtggaaacccgccagattaccaaacatgtggcgcagattctggatagccgcatgaacaccaaatatgatgaaaacgataaactgattcgcgaagtgaaagtgattaccctgaaaagcaaactggtgagcgattttcgcaaagattttcagttttataaagtgcgcgaaattaacaactatcatcatgcgcatgatgcgtatctgaacgcggtggtgggcaccgcgctgattaaaaaatatccgaaactggaaagcgaatttgtgtatggcgattataaagtgtatgatgtgcgcaaaatgattgcgaaaagcgaacaggaaattggcaaagcgaccgcgaaatattttttttatagcaacattatgaacttttttaaaaccgaaattaccctggcgaacggcgaaattcgcaaacgcccgctgattgaaaccaacggcgaaaccggcgaaattgtgtgggataaaggccgcgattttgcgaccgtgcgcaaagtgctgagcatgccgcaggtgaacattgtgaaaaaaaccgaagtgcagaccggcggctttagcaaagaaagcattctgccgaaacgcaacagcgataaactgattgcgcgcaaaaaagattgggatccgaaaaaatatggcggctttgatagcccgaccgtggcgtatagcgtgctggtggtggcgaaagtggaaaaaggcaaaagcaaaaaactgaaaagcgtgaaagaactgctgggcattaccattatggaacgcagcagctttgaaaaaaacccgattgattttctggaagcgaaaggctataaagaagtgaaaaaagatctgattattaaactgccgaaatatagcctgtttgaactggaaaacggccgcaaacgcatgctggcgagcgcgggcgaactgcagaaaggcaacgaactggcgctgccgagcaaatatgtgaactttctgtatctggcgagccattatgaaaaactgaaaggcagcccggaagataacgaacagaaacagctgtttgtggaacagcataaacattatctggatgaaattattgaacagattagcgaatttagcaaacgcgtgattctggcggatgcgaacctggataaagtgctgagcgcgtataacaaacatcgcgataaaccgattcgcgaacaggcggaaaacattattcatctgtttaccctgaccaacctgggcgcgccggcggcgtttaaatattttgataccaccattgatcgcaaacgctataccagcaccaaagaagtgctggatgcgaccctgattcatcagagcattaccggcctgtatgaaacccgcattgatctgagccagctgggcggcgat

SEQ ID NO: 20 - DNA, 4104 bp, Streptococcus pyogenes
  source 1..4104: mol_type = genomic DNA
atggataagaaatactcaataggcttagatatcggcacaaatagcgtcggatgggcggtgatcactgatgattataaggttccgtctaaaaagttcaaggttctgggaaatacagaccgccacagtatcaaaaaaaatcttataggggctcttttatttggcagtggagagacagcggaagcgactcgtctcaaacggacagctcgtagaaggtatacacgtcggaagaatcgtatttgttatctacaggagattttttcaaatgagatggcgaaagtagatgatagtttctttcatcgacttgaagagtcttttttggtggaagaagacaagaagcatgaacgtcatcctatttttggaaatatagtagatgaagttgcttatcatgagaaatatccaactatctatcatctgcgaaaaaaattggcagattctactgataaagcggatttgcgcttaatctatttggccttagcgcatatgattaagtttcgtggtcattttttgattgagggagatttaaatcctgataatagtgatgtggacaaactatttatccagttggtacaaatctacaatcaattatttgaagaaaaccctattaacgcaagtagagtagatgctaaagcgattctttctgcacgattgagtaaatcaagacgattagaaaatctcattgctcagctccccggtgagaagagaaatggcttgtttgggaatctcattgctttgtcattgggattgacccctaattttaaatcaaattttgatttggcagaagatgctaaattacagctttcaaaagatacttacgatgatgatttagataatttattggcgcaaattggagatcaatatgctgatttgtttttggcagctaagaatttatcagatgctattttactttcagatatcctaagagtaaatagtgaaataactaaggctcccctatcagcttcaatgattaagcgctacgatgaacatcatcaagacttgactcttttaaaagctttagttcgacaacaacttccagaaaagtataaagaaatcttttttgatcaatcaaaaaacggatatgcaggttatattgatgggggagctagccaagaagaattttataaatttatcaaaccaattttagaaaaaatggatggtactgaggaattattggtgaaactaaatcgtgaagatttgctgcgcaagcaacggacctttgacaacggctctattccccatcaaattcacttgggtgagctgcatgctattttgagaagacaagaagacttttatccatttttaaaagacaatcgtgagaagattgaaaaaatcttgacttttcgaattccttattatgttggtccattggcgcgtggcaatagtcgttttgcatggatgactcggaagtctgaagaaacaattaccccatggaattttgaagaagttgtcgataaaggtgcttcagctcaatcatttattgaacgcatgacaaactttgataaaaatcttccaaatgaaaaagtactaccaaaacatagtttgctttatgagtattttacggtttataacgaattgacaaaggtcaaatatgttactgagggaatgcgaaaaccagcatttctttcaggtgaacagaagaaagccattgttgatttactcttcaaaacaaatcgaaaagtaaccgttaagcaattaaaagaagattatttcaaaaaaatagaatgttttgatagtgttgaaatttcaggagttgaagatagatttaatgcttcattaggcgcctaccatgatttgctaaaaattattaaagataaagattttttggataatgaagaaaatgaagatatcttagaggatattgttttaacattgaccttatttgaagatagggggatgattgaggaaagacttaaaacatatgctcacctctttgatgataaggtgatgaaacagcttaaacgtcgccgttatactggttggggacgtttgtctcgaaaattgattaatggtattagggataagcaatctggcaaaacaatattagattttttgaaatcagatggttttgccaatcgcaattttatgcagctgatccatgatgatagtttgacatttaaagaagatattcaaaaagcacaggtgtctggacaaggccatagtttacatgaacagattgctaacttagctggcagtcctgctattaaaaaaggtattttacagactgtaaaaattgttgatgaactggtcaaagtaatggggcataagccagaaaatatcgttattgaaatggcacgtgaaaatcagacaactcaaaagggccagaaaaattcgcgagagcgtatgaaacgaatcgaagaaggtatcaaagaattaggaagtcagattcttaaagagcatcctgttgaaaatactcaattgcaaaatgaaaagctctatctctattatctacaaaatggaagagacatgtatgtggaccaagaattagatattaatcgtttaagtgattatgatgtcgatcacattgttccacaaagtttcattaaagacgattcaatagacaataaggtactaacgcgttctgataaaaatcgtggtaaatcggataacgttccaagtgaagaagtagtcaaaaagatgaaaaactattggagacaacttctaaacgccaagttaatcactcaacgtaagtttgataatttaacgaaagctgaacgtggaggtttgagtgaacttgataaagctggttttatcaaacgccaattggttgaaactcgccaaatcactaagcatgtggcacaaattttggatagtcgcatgaatactaaatacgatgaaaatgataaacttattcgagaggttaaagtgattaccttaaaatctaaattagtttctgacttccgaaaagatttccaattctataaagtacgtgagattaacaattaccatcatgcccatgatgcgtatctaaatgccgtcgttggaactgctttgattaagaaatatccaaaacttgaatcggagtttgtctatggtgattataaagtttatgatgttcgtaaaatgattgctaagtctgagcaagaaataggcaaagcaaccgcaaaatatttcttttactctaatatcatgaacttcttcaaaacagaaattacacttgcaaatggagagattcgcaaacgccctctaatcgaaactaatggggaaactggagaaattgtctgggataaagggcgagattttgccacagtgcgcaaagtattgtccatgccccaagtcaatattgtcaagaaaacagaagtacagacaggcggattctccaaggagtcaattttaccaaaaagaaattcggacaagcttattgctcgtaaaaaagactgggatccaaaaaaatatggtggttttgatagtccaacggtagcttattcagtcctagtggttgctaaggtggaaaaagggaaatcgaagaagttaaaatccgttaaagagttactagggatcacaattatggaaagaagttcctttgaaaaaaatccgattgactttttagaagctaaaggatataaggaagttaaaaaagacttaatcattaaactacctaaatatagtctttttgagttagaaaacggtcgtaaacggatgctggctagtgccggagaattacaaaaaggaaatgagctggctctgccaagcaaatatgtgaattttttatatttagctagtcattatgaaaagttgaagggtagtccagaagataacgaacaaaaacaattgtttgtggagcagcataagcattatttagatgagattattgagcaaatcagtgaattttctaagcgtgttattttagcagatgccaatttagataaagttcttagtgcatataacaaacatagagacaaaccaatacgtgaacaagcagaaaatattattcatttatttacgttgacgaatcttggagctcccgctgcttttaaatattttgatacaacaattgatcgtaaacgatatacgtctacaaaagaagttttagatgccactcttatccatcaatccatcactggtctttatgaaacacgcattgatttgagtcagctaggaggtgactga

SEQ ID NO: 21 - protein, 1367 aa, Streptococcus pyogenes
MDKKYSIGLDIGTNSVGWAVITDDYKVPSKKFKVLGNTDRHSIKKNLIGALLFGSGETAEATRLKRTARRRYTRRKNRICYLQEIFSNEMAKVDDSFFHRLEESFLVEEDKKHERHPIFGNIVDEVAYHEKYPTIYHLRKKLADSTDKADLRLIYLALAHMIKFRGHFLIEGDLNPDNSDVDKLFIQLVQIYNQLFEENPINASRVDAKAILSARLSKSRRLENLIAQLPGEKRNGLFGNLIALSLGLTPNFKSNFDLAEDAKLQLSKDTYDDDLDNLLAQIGDQYADLFLAAKNLSDAILLSDILRVNSEITKAPLSASMIKRYDEHHQDLTLLKALVRQQLPEKYKEIFFDQSKNGYAGYIDGGASQEEFYKFIKPILEKMDGTEELLVKLNREDLLRKQRTFDNGSIPHQIHLGELHAILRRQEDFYPFLKDNREKIEKILTFRIPYYVGPLARGNSRFAWMTRKSEETITPWNFEEVVDKGASAQSFIERMTNFDKNLPNEKVLPKHSLLYEYFTVYNELTKVKYVTEGMRKPAFLSGEQKKAIVDLLFKTNRKVTVKQLKEDYFKKIECFDSVEISGVEDRFNASLGAYHDLLKIIKDKDFLDNEENEDILEDIVLTLTLFEDRGMIEERLKTYAHLFDDKVMKQLKRRRYTGWGRLSRKLINGIRDKQSGKTILDFLKSDGFANRNFMQLIHDDSLTFKEDIQKAQVSGQGHSLHEQIANLAGSPAIKKGILQTVKIVDELVKVMGHKPENIVIEMARENQTTQKGQKNSRERMKRIEEGIKELGSQILKEHPVENTQLQNEKLYLYYLQNGRDMYVDQELDINRLSDYDVDHIVPQSFIKDDSIDNKVLTRSDKNRGKSDNVPSEEVVKKMKNYWRQLLNAKLITQRKFDNLTKAERGGLSELDKAGFIKRQLVETRQITKHVAQILDSRMNTKYDENDKLIREVKVITLKSKLVSDFRKDFQFYKVREINNYHHAHDAYLNAVVGTALIKKYPKLESEFVYGDYKVYDVRKMIAKSEQEIGKATAKYFFYSNIMNFFKTEITLANGEIRKRPLIETNGETGEIVWDKGRDFATVRKVLSMPQVNIVKKTEVQTGGFSKESILPKRNSDKLIARKKDWDPKKYGGFDSPTVAYSVLVVAKVEKGKSKKLKSVKELLGITIMERSSFEKNPIDFLEAKGYKEVKKDLIIKLPKYSLFELENGRKRMLASAGELQKGNELALPSKYVNFLYLASHYEKLKGSPEDNEQKQLFVEQHKHYLDEIIEQISEFSKRVILADANLDKVLSAYNKHRDKPIREQAENIIHLFTLTNLGAPAAFKYFDTTIDRKRYTSTKEVLDATLIHQSITGLYETRIDLSQLGGD

SEQ ID NO: 22 - DNA, 4212 bp, Streptococcus pyogenes
  source 1..4212: mol_type = genomic DNA
atggataaaaagtattctattggtttagacatcggcactaattccgttggatgggctgtcataaccgatgaatacaaagtaccttcaaagaaatttaaggtgttggggaacacagaccgtcattcgattaaaaagaatcttatcggtgccctcctattcgatagtggcgaaacggcagaggcgactcgcctgaaacgaaccgctcggagaaggtatacacgtcgcaagaaccgaatatgttacttacaagaaatttttagcaatgagatggccaaagttgacgattctttctttcaccgtttggaagagtccttccttgtcgaagaggacaagaaacatgaacggcaccccatctttggaaacatagtagatgaggtggcatatcatgaaaagtacccaacgatttatcacctcagaaaaaagctagttgactcaactgataaagcggacctgaggttaatctacttggctcttgcccatatgataaagttccgtgggcactttctcattgagggtgatctaaatccggacaactcggatgtcgacaaactgttcatccagttagtacaaacctataatcagttgtttgaagagaaccctataaatgcaagtggcgtggatgcgaaggctattcttagcgcccgcctctctaaatcccgacggctagaaaacctgatcgcacaattacccggagagaagaaaaatgggttgttcggtaaccttatagcgctctcactaggcctgacaccaaattttaagtcgaacttcgacttagctgaagatgccaaattgcagcttagtaaggacacgtacgatgacgatctcgacaatctactggcacaaattggagatcagtatgcggacttatttttggctgccaaaaaccttagcgatgcaatcctcctatctgacatactgagagttaatactgagattaccaaggcgccgttatccgcttcaatgatcaaaaggtacgatgaacatcaccaagacttgacacttctcaaggccctagtccgtcagcaactgcctgagaaatataaggaaatattctttgatcagtcgaaaaacgggtacgcaggttatattgacggcggagcgagtcaagaggaattctacaagtttatcaaacccatattagagaagatggatgggacggaagagttgcttgtaaaactcaatcgcgaagatctactgcgaaagcagcggactttcgacaacggtagcattccacatcaaatccacttaggcgaattgcatgctatacttagaaggcaggaggatttttatccgttcctcaaagacaatcgtgaaaagattgagaaaatcctaacctttcgcataccttactatgtgggacccctggcccgagggaactctcggttcgcatggatgacaagaaagtccgaagaaacgattactccatggaattttgaggaagttgtcgataaaggtgcgtcagctcaatcgttcatcgagaggatgaccaactttgacaagaatttaccgaacgaaaaagtattgcctaagcacagtttactttacgagtatttcacagtgtacaatgaactcacgaaagttaagtatgtcactgagggcatgcgtaaacccgcctttctaagcggagaacagaagaaagcaatagtagatctgttattcaagaccaaccgcaaagtgacagttaagcaattgaaagaggactactttaagaaaattgaatgcttcgattctgtcgagatctccggggtagaagatcgatttaatgcgtcacttggtacgtatcatgacctcctaaagataattaaagataaggacttcctggataacgaagagaatgaagatatcttagaagatatagtgttgactcttaccctctttgaagatcgggaaatgattgaggaaagactaaaaacatacgctcacctgttcgacgataaggttatgaaacagttaaagaggcgtcgctatacgggctggggacgattgtcgcggaaacttatcaacgggataagagacaagcaaagtggtaaaactattctcgattttctaaagagcgacggcttcgccaataggaactttatgcagctgatccatgatgactctttaaccttcaaagaggatatacaaaaggcacaggtttccggacaaggggactcattgcacgaacatattgcgaatcttgctggttcgccagccatcaaaaagggcatactccagacagtcaaagtagtggatgagctagttaaggtcatgggacgtcacaaaccggaaaacattgtaatcgagatggcacgcgaaaatcaaacgactcagaaggggcaaaaaaacagtcgagagcggatgaagagaatagaagagggtattaaagaactgggcagccagatcttaaaggagcatcctgtggaaaatacccaattgcagaacgagaaactttacctctattacctacaaaatggaagggacatgtatgttgatcaggaactggacataaaccgtttatctgattacgacgtcgatcacattgtaccccaatcctttttgaaggacgattcaatcgacaataaagtgcttacacgctcggataagaaccgagggaaaagtgacaatgttccaagcgaggaagtcgtaaagaaaatgaagaactattggcggcagctcctaaatgcgaaactgataacgcaaagaaagttcgataacttaactaaagctgagaggggtggcttgtctgaacttgacaaggccggatttattaaacgtcagctcgtggaaacccgccaaatcacaaagcatgttgcacagatactagattcccgaatgaatacgaaatacgacgagaacgataagctgattcgggaagtcaaagtaatcactttaaagtcaaaattggtgtcggacttcagaaaggattttcaattctataaagttagggagataaataactaccaccatgcgcacgacgcttatcttaatgccgtcgtagggaccgcactcattaagaaatacccgaagctagaaagtgagtttgtgtatggtgattacaaagtttatgacgtccgtaagatgatcgcgaaaagcgaacaggagataggcaaggctacagccaaatacttcttttattctaacattatgaatttctttaagacggaaatcactctggcaaacggagagatacgcaaacgacctttaattgaaaccaatggggagacaggtgaaatcgtatgggataagggccgggacttcgcgacggtgagaaaagttttgtccatgccccaagtcaacatagtaaagaaaactgaggtgcagaccggagggttttcaaaggaatcgattcttccaaaaaggaatagtgataagctcatcgctcgtaaaaaggactgggacccgaaaaagtacggtggcttcgatagccctacagttgcctattctgtcctagtagtggcaaaagttgagaagggaaaatccaagaaactgaagtcagtcaaagaattattggggataacgattatggagcgctcgtcttttgaaaagaaccccatcgacttccttgaggcgaaaggttacaaggaagtaaaaaaggatctcataattaaactaccaaagtatagtctgtttgagttagaaaatggccgaaaacggatgttggctagcgccggagagcttcaaaaggggaacgaactcgcactaccgtctaaatacgtgaatttcctgtatttagcgtcccattacgagaagttgaaaggttcacctgaagataacgaacagaagcaactttttgttgagcagcacaaacattatctcgacgaaatcatagagcaaatttcggaattcagtaagagagtcatcctagctgatgccaatctggacaaagtattaagcgcatacaacaagcacagggataaacccatacgtgagcaggcggaaaatattatccatttgtttactcttaccaacctcggcgctccagccgcattcaagtattttgacacaacgatagatcgcaaacgatacacttctaccaaggaggtgctagacgcgacactgattcaccaatccatcacgggattatatgaaactcggatagatttgtcacagcttgggggtgacggatcccccaagaagaagaggaaagtctcgagcgactacaaagaccatgacggtgattataaagatcatgacatcgattacaaggatgacgatgacaaggctgcagga

SEQ ID NO: 23 - protein, 1404 aa, Streptococcus pyogenes
MDKKYSIGLDIGTNSVGWAVITDEYKVPSKKFKVLGNTDRHSIKKNLIGALLFDSGETAEATRLKRTARRRYTRRKNRICYLQEIFSNEMAKVDDSFFHRLEESFLVEEDKKHERHPIFGNIVDEVAYHEKYPTIYHLRKKLVDSTDKADLRLIYLALAHMIKFRGHFLIEGDLNPDNSDVDKLFIQLVQTYNQLFEENPINASGVDAKAILSARLSKSRRLENLIAQLPGEKKNGLFGNLIALSLGLTPNFKSNFDLAEDAKLQLSKDTYDDDLDNLLAQIGDQYADLFLAAKNLSDAILLSDILRVNTEITKAPLSASMIKRYDEHHQDLTLLKALVRQQLPEKYKEIFFDQSKNGYAGYIDGGASQEEFYKFIKPILEKMDGTEELLVKLNREDLLRKQRTFDNGSIPHQIHLGELHAILRRQEDFYPFLKDNREKIEKILTFRIPYYVGPLARGNSRFAWMTRKSEETITPWNFEEVVDKGASAQSFIERMTNFDKNLPNEKVLPKHSLLYEYFTVYNELTKVKYVTEGMRKPAFLSGEQKKAIVDLLFKTNRKVTVKQLKEDYFKKIECFDSVEISGVEDRFNASLGTYHDLLKIIKDKDFLDNEENEDILEDIVLTLTLFEDREMIEERLKTYAHLFDDKVMKQLKRRRYTGWGRLSRKLINGIRDKQSGKTILDFLKSDGFANRNFMQLIHDDSLTFKEDIQKAQVSGQGDSLHEHIANLAGSPAIKKGILQTVKVVDELVKVMGRHKPENIVIEMARENQTTQKGQKNSRERMKRIEEGIKELGSQILKEHPVENTQLQNEKLYLYYLQNGRDMYVDQELDINRLSDYDVDHIVPQSFLKDDSIDNKVLTRSDKNRGKSDNVPSEEVVKKMKNYWRQLLNAKLITQRKFDNLTKAERGGLSELDKAGFIKRQLVETRQITKHVAQILDSRMNTKYDENDKLIREVKVITLKSKLVSDFRKDFQFYKVREINNYHHAHDAYLNAVVGTALIKKYPKLESEFVYGDYKVYDVRKMIAKSEQEIGKATAKYFFYSNIMNFFKTEITLANGEIRKRPLIETNGETGEIVWDKGRDFATVRKVLSMPQVNIVKKTEVQTGGFSKESILPKRNSDKLIARKKDWDPKKYGGFDSPTVAYSVLVVAKVEKGKSKKLKSVKELLGITIMERSSFEKNPIDFLEAKGYKEVKKDLIIKLPKYSLFELENGRKRMLASAGELQKGNELALPSKYVNFLYLASHYEKLKGSPEDNEQKQLFVEQHKHYLDEIIEQISEFSKRVILADANLDKVLSAYNKHRDKPIREQAENIIHLFTLTNLGAPAAFKYFDTTIDRKRYTSTKEVLDATLIHQSITGLYETRIDLSQLGGDGSPKKKRKVSSDYKDHDGDYKDHDIDYKDDDDKAAG

SEQ ID NO: 24 - DNA, 4107 bp, Streptococcus pyogenes
  source 1..4107: mol_type = genomic DNA
atggataagaaatactcaataggcttagatatcggcacaaatagcgtcggatgggcggtgatcactgatgaatataaggttccgtctaaaaagttcaaggttctgggaaatacagaccgccacagtatcaaaaaaaatcttataggggctcttttatttgacagtggagagacagcggaagcgactcgtctcaaacggacagctcgtagaaggtatacacgtcggaagaatcgtatttgttatctacaggagattttttcaaatgagatggcgaaagtagatgatagtttctttcatcgacttgaagagtcttttttggtggaagaagacaagaagcatgaacgtcatcctatttttggaaatatagtagatgaagttgcttatcatgagaaatatccaactatctatcatctgcgaaaaaaattggtagattctactgataaagcggatttgcgcttaatctatttggccttagcgcatatgattaagtttcgtggtcattttttgattgagggagatttaaatcctgataatagtgatgtggacaaactatttatccagttggtacaaacctacaatcaattatttgaagaaaaccctattaacgcaagtggagtagatgctaaagcgattctttctgcacgattgagtaaatcaagacgattagaaaatctcattgctcagctccccggtgagaagaaaaatggcttatttgggaatctcattgctttgtcattgggtttgacccctaattttaaatcaaattttgatttggcagaagatgctaaattacagctttcaaaagatacttacgatgatgatttagataatttattggcgcaaattggagatcaatatgctgatttgtttttggcagctaagaatttatcagatgctattttactttcagatatcctaagagtaaatactgaaataactaaggctcccctatcagcttcaatgattaaacgctacgatgaacatcatcaagacttgactcttttaaaagctttagttcgacaacaacttccagaaaagtataaagaaatcttttttgatcaatcaaaaaacggatatgcaggttatattgatgggggagctagccaagaagaattttataaatttatcaaaccaattttagaaaaaatggatggtactgaggaattattggtgaaactaaatcgtgaagatttgctgcgcaagcaacggacctttgacaacggctctattccccatcaaattcacttgggtgagctgcatgctattttgagaagacaagaagacttttatccatttttaaaagacaatcgtgagaagattgaaaaaatcttgacttttcgaattccttattatgttggtccattggcgcgtggcaatagtcgttttgcatggatgactcggaagtctgaagaaacaattaccccatggaattttgaagaagttgtcgataaaggtgcttcagctcaatcatttattgaacgcatgacaaactttgataaaaatcttccaaatgaaaaagtactaccaaaacatagtttgctttatgagtattttacggtttataacgaattgacaaaggtcaaatatgttactgaaggaatgcgaaaaccagcatttctttcaggtgaacagaagaaagccattgttgatttactcttcaaaacaaatcgaaaagtaaccgttaagcaattaaaagaagattatttcaaaaaaatagaatgttttgatagtgttgaaatttcaggagttgaagatagatttaatgcttcattaggtacctaccatgatttgctaaaaattattaaagataaagattttttggataatgaagaaaatgaagatatcttagaggatattgttttaacattgaccttatttgaagatagggagatgattgaggaaagacttaaaacatatgctcacctctttgatgataaggtgatgaaacagcttaaacgtcgccgttatactggttggggacgtttgtctcgaaaattgattaatggtattagggataagcaatctggcaaaacaatattagattttttgaaatcagatggttttgccaatcgcaattttatgcagctgatccatgatgatagtttgacatttaaagaagacattcaaaaagcacaagtgtctggacaaggcgatagtttacatgaacatattgcaaatttagctggtagccctgctattaaaaaaggtattttacagactgtaaaagttgttgatgaattggtcaaagtaatggggcggcataagccagaaaatatcgttattgaaatggcacgtgaaaatcagacaactcaaaagggccagaaaaattcgcgagagcgtatgaaacgaatcgaagaaggtatcaaagaattaggaagtcagattcttaaagagcatcctgttgaaaatactcaattgcaaaatgaaaagctctatctctattatctccaaaatggaagagacatgtatgtggaccaagaattagatattaatcgtttaagtgattatgatgtcgatcacattgttccacaaagtttccttaaagacgattcaatagacaataaggtcttaacgcgttctgataaaaatcgtggtaaatcggataacgttccaagtgaagaagtagtcaaaaagatgaaaaactattggagacaacttctaaacgccaagttaatcactcaacgtaagtttgataatttaacgaaagctgaacgtggaggtttgagtgaacttgataaagctggttttatcaaacgccaattggttgaaactcgccaaatcactaagcatgtggcacaaattttggatagtcgcatgaatactaaatacgatgaaaatgataaacttattcgagaggttaaagtgattaccttaaaatctaaattagtttctgacttccgaaaagatttccaattctataaagtacgtgagattaacaattaccatcatgcccatgatgcgtatctaaatgccgtcgttggaactgctttgattaagaaatatccaaaacttgaatcggagtttgtctatggtgattataaagtttatgatgttcgtaaaatgattgctaagtctgagcaagaaataggcaaagcaaccgcaaaatatttcttttactctaatatcatgaacttcttcaaaacagaaattacacttgcaaatggagagattcgcaaacgccctctaatcgaaactaatggggaaactggagaaattgtctgggataaagggcgagattttgccacagtgcgcaaagtattgtccatgccccaagtcaatattgtcaagaaaacagaagtacagacaggcggattctccaaggagtcaattttaccaaaaagaaattcggacaagcttattgctcgtaaaaaagactgggatccaaaaaaatatggtggttttgatagtccaacggtagcttattcagtcctagtggttgctaaggtggaaaaagggaaatcgaagaagttaaaatccgttaaagagttactagggatcacaattatggaaagaagttcctttgaaaaaaatccgattgactttttagaagctaaaggatataaggaagttaaaaaagacttaatcattaaactacctaaatatagtctttttgagttagaaaacggtcgtaaacggatgctggctagtgccggagaattacaaaaaggaaatgagctggctctgccaagcaaatatgtgaattttttatatttagctagtcattatgaaaagttgaagggtagtccagaagataacgaacaaaaacaattgtttgtggagcagcataagcattatttagatgagattattgagcaaatcagtgaattttctaagcgtgttattttagcagatgccaatttagataaagttcttagtgcatataacaaacatagagacaaaccaatacgtgaacaagcagaaaatattattcatttatttacgttgacgaatcttggagctcccgctgcttttaaatattttgatacaacaattgatcgtaaacgatatacgtctacaaaagaagttttagatgccactcttatccatcaatccatcactggtctttatgaaacacgcattgatttgagtcagctaggaggtgactga

SEQ ID NO: 25 - protein, 1368 aa, Streptococcus pyogenes [sequence omitted]

SEQ ID NO: 26 - protein, 1378 aa, Lactobacillus fermentum
MKEYHIGLDIGTSSIGWAVTDSQFKLMRIKGKTAIGVRLFEEGKTAAERRTFRTTRRRLKRRKWRLHYLDEIFAPHLQEVDENFLRRLKQSNIHPEDPTKNQAFIGKLLFPDLLKKNERGYPTLIKMRDELPVEQRAHYPVMNIYKLREAMINEDRQFDLREVYLAVHHIVKYRGHFLNNASVDKFKVGRIDFDKSFNVLNEAYEELQNGEGSFTIEPSKVEKIGQLLLDTKMRKLDRQKAVAKLLEVKVADKEETKRNKQIATAMSKLVLGYKADFATVAMANGNEWKIDLSSETSEDEIEKFREELSDAQNDILTEITSLFSQIMLNEIVPNGMSISESMMDRYWTHERQLAEVKEYLATQPASARKEFDQVYNKYIGQAPKERGFDLEKGLKKILSKKENWKEIDELLKAGDFLPKQRTSANGVIPHQMHQQELDRIIEKQAKYYPWLATENPATGERDRHQAKYELDQLVSFRIPYYVGPLVTPEVQKATSGAKFAWAKRKEDGEITPWNLWDKIDRAESAEAFIKRMTVKDTYLLNEDVLPANSLLYQKYNVLNELNNVRVNGRRLSVGIKQDIYTELFKKKKTVKASDVASLVMAKTRGVNKPSVEGLSDPKKFNSNLATYLDLKSIVGDKVDDNRYQTDLENIIEWRSVFEDGEIFADKLTEVEWLTDEQRSALVKKRYKGWGRLSKKLLTGIVDENGQRIIDLMWNTDQNFKEIVDQPVFKEQIDQLNQKAITNDGMTLRERVESVLDDAYTSPQNKKAIWQVVRVVEDIVKAVGNAPKSISIEFARNEGNKGEITRSRRTQLQKLFEDQAHELVKDTSLTEELEKAPDLSDRYYFYFTQGGKDMYTGDPINFDEISTKYDIDHILPQSFVKDNSLDNRVLTSRKENNKKSDQVPAKLYAAKMKPYWNQLLKQGLITQRKFENLTKDVDQNIKYRSLGFVKRQLVETRQVIKLTANILGSMYQEAGTEIIETRAGLTKQLREEFDLPKVREVNDYHHAVDAYLTTFAGQYLNRRYPKLRSFFVYGEYMKFKHGSDLKLRNFNFFHELMEGDKSQGKVVDQQTGELITTRDEVAKSFDRLLNMKYMLVSKEVHDRSDQLYGATIVTAKESGKLTSPIEIKKNRLVDLYGAYTNGTSAFMTIIKFTGNKPKYKVIGIPTTSAASLKRAGKPGSESYNQELHRIIKSNPKVKKGFEIVVPHVSYGQLIVDGDCKFTLASPTVQHPATQLVLSKKSLETISSGYKILKDKPAIANERLIRVFDEVVGQMNRYFTIFDQRSNRQKVADARDKFLSLPTESKYEGAKKVQVGKTEVITNLLMGLHANATQGDLKVLGLATFGFFQSTTGLSLSEDTMIVYQSPTGLFERRICLKDI

SEQ ID NO: 27 - protein, 1368 aa, Streptococcus pyogenes [sequence omitted]

SEQ ID NO: 28 - protein, 1053 aa, Staphylococcus aureus
MGKRNYILGLDIGITSVGYGIIDYETRDVIDAGVRLFKEANVENNEGRRSKRGARRLKRRRRHRIQRVKKLLFDYNLLTDHSELSGINPYEARVKGLSQKLSEEEFSAALLHLAKRRGVHNVNEVEEDTGNELSTKEQISRNSKALEEKYVAELQLERLKKDGEVRGSINRFKTSDYVKEAKQLLKVQKAYHQLDQSFIDTYIDLLETRRTYYEGPGEGSPFGWKDIKEWYEMLMGHCTYFPEELRSVKYAYNADLYNALNDLNNLVITRDENEKLEYYEKFQIIENVFKQKKKPTLKQIAKEILVNEEDIKGYRVTSTGKPEFTNLKVYHDIKDITARKEIIENAELLDQIAKILTIYQSSEDIQEELTNLNSELTQEEIEQISNLKGYTGTHNLSLKAINLILDELWHTNDNQIAIFNRLKLVPKKVDLSQQKEIPTTLVDDFILSPVVKRSFIQSIKVINAIIKKYGLPNDIIIELAREKNSKDAQKMINEMQKRNRQTNERIEEIIRTTGKENAKYLIEKIKLHDMQEGKCLYSLEAIPLEDLLNNPFNYEVDHIIPRSVSFDNSFNNKVLVKQEENSKKGNRTPFQYLSSSDSKISYETFKKHILNLAKGKGRISKTKKEYLLEERDINRFSVQKDFINRNLVDTRYATRGLMNLLRSYFRVNNLDVKVKSINGGFTSFLRRKWKFKKERNKGYKHHAEDALIIANADFIFKEWKKLDKAKKVMENQMFEEKQAESMPEIETEQEYKEIFITPHQIKHIKDFKDYKYSHRVDKKPNRKLINDTLYSTRKDDKGNTLIVNNLNGLYDKDNDKLKKLINKSPEKLLMYHHDPQTYQKLKLIMEQYGDEKNPLYKYYEETGNYLTKYSKKDNGPVIKKIKYYGNKLNAHLDITDDYPNSRNKVVKLSLKPYRFDVYLDNGVYKFVTVKNLDVIKKENYYEVNSKCYEEAKKLKKISNQAEFIASFYKNDLIKINGELYRVIGVNNDLLNRIEVNMIDITYREYLENMNDKRPPHIIKTIASKTQSIKKYSTDILGNLYEVKSKKHPQIIKK

SEQ ID NO: 29 - protein, 1409 aa, Streptococcus thermophilus
MLFNKCIIISINLDFSNKEKCMTKPYSIGLDIGTNSVGWAVITDNYKVPSKKMKVLGNTSKKYIKKNLLGVLLFDSGITAEGRRLKRTARRRYTRRRNRILYLQEIFSTEMATLDDAFFQRLDDSFLVPDDKRDSKYPIFGNLVEEKVYHDEFPTIYHLRKYLADSTKKADLRLVYLALAHMIKYRGHFLIEGEFNSKNNDIQKNFQDFLDTYNAIFESDLSLENSKQLEEIVKDKISKLEKKDRILKLFPGEKNSGIFSEFLKLIVGNQADFRKCFNLDEKASLHFSKESYDEDLETLLGYIGDDYSDVFLKAKKLYDAILLSGFLTVTDNETEAPLSSAMIKRYNEHKEDLALLKEYIRNISLKTYNEVFKDDTKNGYAGYIDGKTNQEDFYVYLKNLLAEFEGADYFLEKIDREDFLRKQRTFDNGSIPYQIHLQEMRAILDKQAKFYPFLAKNKERIEKILTFRIPYYVGPLARGNSDFAWSIRKRNEKITPWNFEDVIDKESSAEAFINRMTSFDLYLPEEKVLPKHSLLYETFNVYNELTKVRFIAESMRDYQFLDSKQKKDIVRLYFKDKRKVTDKDIIEYLHAIYGYDGIELKGIEKQFNSSLSTYHDLLNIINDKEFLDDSSNEAIIEEIIHTLTIFEDREMIKQRLSKFENIFDKSVLKKLSRRHYTGWGKLSAKLINGIRDEKSGNTILDYLIDDGISNRNFMQLIHDDALSFKKKIQKAQIIGDEDKGNIKEVVKSLPGSPAIKKGILQSIKIVDELVKVMGGRKPESIVVEMARENQYTNQGKSNSQQRLKRLEKSLKELGSKILKENIPAKLSKIDNNALQNDRLYLYYLQNGKDMYTGDDLDIDRLSNYDIDHIIPQAFLKDNSIDNKVLVSSASNRGKSDDFPSLEVVKKRKTFWYQLLKSKLISQRKFDNLTKAERGGLLPEDKAGFIQRQLVETRQITKHVARLLDEKFNNKKDENNRAVRTVKIITLKSTLVSQFRKDFELYKVREINDFHHAHDAYLNAVIASALLKKYPKLEPEFVYGDYPKYNSFRERKSATEKVYFYSNIMNIFKKSISLADGRVIERPLIEVNEETGESVWNKESDLATVRRVLSYPQVNVVKKVEEQNHGLDRGKPKGLFNANLSSKPKPNSNENLVGAKEYLDPKKYGGYAGISNSFAVLVKGTIEKGAKKKITNVLEFQGISILDRINYRKDKLNFLLEKGYKDIELIIELPKYSLFELSDGSRRMLASILSTNNKRGEIHKGNQIFLSQKFVKLLYHAKRISNTINENHRKYVENHKKEFEELFYYILEFNENYVGAKKNGKLLNSAFQSWQNHSIDELCSSFIGPTGSERKGLFELTSRGSAADFEFLGVKIPRYRDYTPSSLLKDATLIHQSVTGLYETRIDLAKLGEG

SEQ ID NO: 30 - protein, 1402 aa, Lactobacillus crispatus
MKIKNYNLALTPSTSAVGHVEVDDDLNILEPVHHQKAIGVAKFGEGETAEARRLARSARRTTKRRANRINHYFNEIMKPEIDKVDPLMFDRIKQAGLSPLDERKEFRTVIFDRPNIASYYHNQFPTIWHLQKYLMITDEKADIRLIYWALHSLLKHRGHFFNTTPMSQFKPGKLNLKDDMLALDDYNDLEGLSFAVANSPEIEKVIKDRSMHKKEKIAELKKLIVNDVPDKDLAKRNNKIITQIVNAIMGNSFHLNFIFDMDLDKLTSKAWSFKLDDPELDTKFDAISGSMTDNQIGIFETLQKIYSAISLLDILNGSSNVVDAKNALYDKHKRDLNLYFKFLNTLPDEIAKTLKAGYTLYIGNRKKDLLAARKLLKVNVAKNFSQDDFYKLINKELKSIDKQGLQTRFSEKVGELVAQNNFLPVQRSSDNVFIPYQLNAITFNKILENQGKYYDFLVKPNPAKKDRKNAPYELSQLMQFTIPYYVGPLVTPEEQVKSGIPKTSRFAWMVRKDNGAITPWNFYDKVDIEATADKFIKRSIAKDSYLLSELVLPKHSLLYEKYEVFNELSNVSLDGKKLSGGVKQILFNEVFKKTNKVNTSRILKALAKHNIPGSKITGLSNPEEFTSSLQTYNAWKKYFPNQIDNFAYQQDLEKMIEWSTVFEDHKILAKKLDEIEWLDDDQKKFVANTRLRGWGRLSKRLLTGLKDNYGKSIMQRLETTKANFQQIVYKPEFREQIDKISQAAAKNQSLEDILANSYTSPSNRKAIRKTMSVVDEYIKLNHGKEPDKIFLMFQRSEQEKGKQTEARSKQLNRILSQLKADKSANKLFSKQLADEFSNAIKKSKYKLNDKQYFYFQQLGRDALTGEVIDYDELYKYTVLHIIPRSKLTDDSQNNKVLTKYKIVDGSVALKFGNSYSDALGMPIKAFWTELNRLKLIPKGKLLNLTTDFSTLNKYQRDGYIARQLVETQQIVKLLATIMQSRFKHTKIIEVRNSQVANIRYQFDYFRIKNLNEYYRGFDAYLAAVVGTYLYKVYPKARRLFVYGQYLKPKKTNQENQDMHLDSEKKSQGFNFLWNLLYGKQDQIFVNGTDVIAFNRKDLITKMNTVYNYKSQKISLAIDYHNGAMFKATLFPRNDRDTAKTRKLIPKKKDYDTDIYGGYTSNVDGYMLLAEIIKRDGNKQYGFYGVPSRLVSELDTLKKTRYTEYEEKLKEIIKPELGVDLKKIKKIKILKNKVPFNQVIIDKGSKFFITSTSYRWNYRQLILSAESQQTLMDLVVDPDFSNHKARKDARKNADERLIKVYEEILYQVKNYMPMFVELHRCYEKLVDAQKTFKSLKISDKAMVLNQILILLHSNATSPVLEKLGYHTRFTLGKKHNLISENAVLVTQSITGLKENHVSIKQML

SEQ ID NO: 31 - protein, 1385 aa, unidentified
  source 1..1385: note = Thermoactinomyces candidus
MTNEKYSIGLDIGTSSIGFAVVNDNNRVIRVKGKNAIGVRLFDEGKAAADRRSFRTTRRSFRTTRRRLSRRRWRLKLLREIFDAYITPVDEAFFIRLKESNLSPKDSKKQYSGDILFNDRSDKDFYEKYPTIYHLRNALMTEHRKFDVREIYLAIHHIMKFRGHFLNATPANNFKVGRLNLEEKFEELNDIYQRVFPDESIEFRTDNLEQIKEVLLDNKRSRADRQRTLVSDIYQSSEDKDIEKRNKAVATEILKASLGNKAKLNVITNVEVDKEAAKEWSITFDSESIDDDLAKIEGQMTDDGHEIIEVLRSLYSGITLSAIVPENHTLSQSMVAKYDLHKDHLKLFKKLINGMTDTKKAKNLRAAYDGYIDGVKGKVLPQEDFYKQVQVNLDDSAEANEIQTYIDQDIFMPKQRTKANGSIPHQLQQQELDQIIENQKAYYPWLAELNPNPDKKRQQLAKYKLDELVTFRVPYYVGPMITAKDQKNQSGAEFAWMIRKEPGNITPWNFDQKVDRMATANQFIKRMTTTDTYLLGEDVLPAQSLLYQKFEVLNELNKIRIDHKPISIEQKQQIFNDLFKQFKNVTIKHLQDYLVSQGQYSKRPLIEGLADEKRFNSSLSTYSDLCGIFGAKLVEENDRQEDLEKIIEWSTIFEDKKIYRAKLNDLTWLTDDQKEKLATKRYQGWGRLSRKLLVGLKNSEHRNIMDILWITNENFMQIQAEPDFAKLVTDANKGMLEKTDSQDVINDLYTSPQNKKAIRQILLVVHDIQNAMHGQAPAKIHVEFARGEERNPRRSVQRQRQVEAAYEKVSNELVSAKVRQEFKEAINNKRDFKDRLFLYFMQGGIDIYTGKQLNIDQLSSYQIDHILPQAFVKDDSLTNRVLTNENQVKADSVPIDIFGKKMLSVWGRMKDQGLISKGKYRNLTMNPENISAHTENGFINRQLVETRQVIKLAVNILADEYGDSTQIISVKADLSHQMREDFELLKNRDVNDYHHAFDAYLAAFIGNYLLKRYPKLESYFVYGDFKKFTQKETKMRRFNFIYDLKHCDQVVNKETGEILWTKDEDIKYIRHLFAYKKILVSHEVREKRGALYNQTIYKAKDDKGSGQESKKLIRIKDDKETKIYGGYSGKSLAYMTIVQITKKNKVSYRVIGIPTLALARLNKLENDSTENNGELYKIIKPQFTHYKVDKKNGEIIETTDDFKIVVSKVRFQQLIDDAGQFFMLASDTYKNNAQQLVISNNALKAINNTNITDCPRDDLERLDNLRLDSAFDEIVKKMDKYFSAYDANNFREKIRNSNLIFYQLPVEDQWENNKITELGKRTVLTRILQGLHANATTTDMSIFKIKTPFGQLRQRSGISLSENAQLIYQSPTGLFERRVQLNKIK

SEQ ID NO: 32 - protein, 1367 aa, Fusobacterium nucleatum
MKKQKFSDYYLGFDIGTNSVGWCVTDLDYNVLRFNKKDMWGSRLFEEAKTAAERRVQRNSRRRLKRRKWRLNLLEEIFSNEILKIDSNFFRRLKESSLWLEDKSSKEKFTLFNDDNYKDYDFYKQYPTIFHLRNELIKNPEKKDIRLVYLAIHSIFKSRGHFLFEGQNLKEIKNFETLYNNLIAFLEDNGINKIIDKNNIEKLEKIVCDSKKGLKDKEKEFKEIFNSDKQLVAIFKLSVGSSVSLNDLFDTDEYKKGEVEKEKISFREQIYEDDKPIYYSILGEKIELLDIAKTFYDFMVLNNILADSQYISEAKVKLYEEHKKDLKNLKYIIRKYNKGNYDKLFKDKNENNYSAYIGLNKEKSKKEVIEKSRLKIDDLIKNIKGYLPKVEEIEEKDKAIFNKILNKIELKTILPKQRISDNGTLPYQIHEAELEKILENQSKYYDFLNYEENGIITKDKLLMTFKFRIPYYVGPLNSYHKDKGGNSWIVRKEEGKILPWNFEQKVDIEKSAEEFIKRMTNKCTYLNGEDVIPKDTFLYSEYVILNELNKVQVNDEFLNEENKRKIIDELFKENKKVSEKKFKEYLLVKQIVDGTIELKGVKDSFNSNYISYIRFKDIFGEKLNLDIYKEISEKSILWKCLYGDDKKIFEKKIKNEYGDILTKDEIKKINTFKFNNWGRLSEKLLTGIEFINLETGECYSSVMDALRRTNYNLMELLSSKFTLQESINNENKEMNEASYRDLIEESYVSPSLKRAIFQTLKIYEEIRKITGRVPKKVFIEMARGGDESMKNKKIPARQEQLKKLYDSCGNDIANFSIDIKEMKNSLISYDNNSLRQKKLYLYYLQFGKCMYTGREIDLDRLLQNNDTYDIDHIYPRSKVIKDDSFDNLVLVLKNENAEKSNEYPVKKEIQEKMKSFWRFLKEKNFISDEKYKRLTGKDDFELRGFMARQLVNVRQTTKEVGKILQQIEPEIKIVYSKAEIASSFREMFDFIKVRELNDTHHAKDAYLNIVAGNVYNTKFTEKPYRYLQEIKENYDVKKIYNYDIKNAWDKENSLEIVKKNMEKNTVNITRFIKEKKGQLFDLNPIKKGETSNEIISIKPKVYNGKDDKLNEKYGYYKSLNPAYFLYVEHKEKNKRIKSFERVNLVDVNNIKDEKSLVKYLIENKKLVEPRVIKKVYKRQVILINDYPYSIVTLDSNKLMDFENLKPLFLENKYEKILKNVIKFLEDNQGKSEENYKFIYLKKKDRYEKNETLESVKDRYNLEFNEMYDKFLEKLDSKDYKNYMNNKKYQELLDVKEKFIKLNLFDKAFTLKSFLDLFNRKTMADFSKVGLTKYLGKIQKISSNVLSKNELYLLEESVTGLFVKKIKL

SEQ ID NO: 33 - protein, 1286 aa, Enterococcus cecorum
RRKQRIQILQELLGEEVLKTDPGFFHRMKESRYVVEDKRTLDGKQVELPYALFVDKDYTDKEYYKQFPTINHLIVYLMTTSDTPDIRLVYLALHYYMKNRGNFLHSGDINNVKDINDILEQLDNVLETFLDGWNLKLKSYVEDIKNIYNRDLGRGERKKAFVNTLGAKTKAEKAFCSLISGGSTNLAELFDDSSLKEIETPKIEFASSSLEDKIDGIQEALEDRFAVIEAAKRLYDWKTLTDILGDSSSLAEARVNSYQMHHEQLLELKSLVKEYLDRKVFQEVFVSLNVANNYPAYIGHTKINGKKKELEVKRTKRNDFYSYVKKQVIEPIKKKVSDEAVLTKLSEIESLIEVDKYLPLQVNSDNGVIPYQVKLNELTRIFDNLENRIPVLRENRDKIIKTFKFRIPYYVGSLNGVVKNGKCTNWMVRKEEGKIYPWNFEDKVDLEASAEQFIRRMTNKCTYLVNEDVLPKYSLLYSKYLVLSELNNLRIDGRPLDVKIKQDIYENVFKKNRKVTLKKIKKYLLKEGIITDDDELSGLADDVKSSLTAYRDFKEKLGHLDLSEAQMENIILNITLFGDDKKLLKKRLAALYPFIDDKSLNRIATLNYRDWGRLSERFLSGITSVDQETGELRTIIQCMYETQANLMQLLAEPYHFVEAIEKENPKVDLESISYRIVNDLYVSPAVKRQIWQTLLVIKDIKQVMKHDPERIFIEMAREKQESKKTKSRKQVLSEVYKKAKEYEHLFEKLNSLTEEQLRSKKIYLYFTQLGKCMYSGEPIDFENLVSANSNYDIDHIYPQSKTIDDSFNNIVLVKKSLNAYKSNHYPIDKNIRDNEKVKTLWNTLVSKGLITKEKYERLIRSTPFSDEELAGFIARQLVETRQSTKAVAEILSNWFPESEIVYSKAKNVSNFRQDFEILKVRELNDCHHAHDAYLNIVVGNAYHTKFTNSPYRFIKNKANQEYNLRKLLQKVNKIESNGVVAWVGQSENNPGTIATVKKVIRRNTVLISRMVKEVDGQLFDLTLMKKGKGQVPIKSSDERLTDISKYGGYNKATGAYFTFVKSKKRGKVVRSFEYVPLHLSKQFENNNELLKEYIEKDRGLTDVEILIPKVLINSLFRYNGSLVRITGRGDTRLLLVHEQPLYVSNSFVQQLKSVSSYKLKKSENDNAKLTKTATEKLSNIDELYDGLLRKLDLPIYSYWFSSIKEYLVESRTKYIKLSIEEKALVIFEILHLFQSDAQVPNLKILGLSTKPSRIRIQKNLKDTDKMSIIHQSPSGIFEHEIELTSL

SEQ ID NO: 34 - protein, 1312 aa, unidentified
  source 1..1312: note = Anaerostipes hadrus
MQNGFLGITVSSEQVGWAVTNPKYELERASRKDLWGVRLFDKAETAEDRRMFRTNRRLNQRKKNRIHYLRDIFHEEVNQKDPNFFQQLDESNFCEDDRTVEFNFDTNLYKNQFPTVYHLRKYLMETKDKPDIRLVYLAFSKFMKNRGHFLYKGNLGEVMDFENSMKGFCESLEKFNIDFPTLSDEQVKEVRDILCDHKIAKTVKKKNIITITKVKSKTAKAWIGLFCGCSVPVKVLFQDIDEEIVTDPEKISFEDASYDDYIANIEKGVGIYYEAIVSAKMLFDWSILNEILGDHQLLSDAMIAEYNKHHDDLKRLQKIIKGTGSRELYQDIFINDVSGNYVCYVGHAKTMSSADQKQFYTFLKNRLKNVNGISSEDAEWIDTEIKNGTLLPKQTKRDNSVIPHQLQLREFELILDNMQEMYPFLKENREKLLKIFNFVIPYYVGPLKGVVRKGESTNWMVPKKDGVIHPWNFDEMVDKEASAECFISRMTGNCSYLFNEKVLPKNSLLYETFEVLNELNPLKINGEPISVELKQRIYEQLFLTGKKVTKKSLTKYLIKNGYDKDIELSGIDNEFHSNLKSHIDFEDYDNLSDEEVEQIILRITVFEDKQLLKDYLNREFVKLSEDERKQICSLSYKGWGNLSEMLLNGITVTDSNGVEVSVMDMLWNTNLNLMQILSKKYGYKAEIEHYNKEHEKTIYNREDLMDYLNIPPAQRRKVNQLITIVKSLKKTYGVPNKIFFKISREHQDDPKRTSSRKEQLKYLYKSLKSEDEKHLMKELDELNDHELSNDKVYLYFLQKGRCIYSGKKLNLSRLRKSNYQNDIDYIYPLSAVNDRSMNNKVLTGIQENRADKYTYFPVDSEIQKKMKGFWMELVLQGFMTKEKYFRLSRENDFSKSELVSFIEREISDNQQSGRMIASVLQYYFPESKIVFVKEKLISSFKRDFHLISSYGHNHLQAAKDAYITIVVGNVYHTKFTMDPAIYFKNHKRKDYDLNRLFLENISRDGQIAWESGPYGSIQTVRKEYAQNHIAVTKRVVEVKGGLFKQMPLKKGHGEYPLKTNDPRFGNIAQYGGYTNVTGSYFVLVESMEKGKKRISLEYVPVYLHERLEDDPGHKLLKEYLVDHRKLNHPKILLAKVRKNSLLKIDGFYYRLNGRSGNALILTNAVELIMDDWQTKTANKISGYMKRRAIDKKARVYQNEFHIQELEQLYDFYLDKLKNGVYKNRKNNQAELIHNEKEQFMELKTEDQCVLLTEIKKLFVCSPMQADLTLIGGSKHTGMIAMSSNVTKADFAVIAEDPLGLRNKVIYSHKGEK

SEQ ID NO: 35 - protein, 1344 aa, Kandleria vitulina
MSQNNNKIYNIGLDIGDASVGWAVVDEHYNLLKRHGKHMWGSRLFTQANTAVERRSSRSTRRRYNKRRERIRLLREIMEDMVLDVDPTFFIRLANVSFLDQEDKKDYLKENYHSNYNLFIDKDFNDKTYYDKYPTIYHLRKHLCESKEKEDPRLIYLALHHIVKYRGNFLYEGQKFSMDVSNIEDKMIDVLRQFNEINLFEYVEDRKKIDEVLNVLKEPLSKKHKAEKAFALFDTTKDNKAAYKELCAALAGNKFNVTKMLKEAELHDEDEKDISFKFSDATFDDAFVEKQPLLGDCVEFIDLLHDIYSWVELQNILGSAHTSEPSISAAMIQRYEDHKNDLKLLKDVIRKYLPKKYFEVFRDEKSKKNNYCNYINHPSKTPVDEFYKYIKKLIEKIDDPDVKTILNKIELESFMLKQNSRTNGAVPYQMQLDELNKILENQSVYYSDLKDNEDKIRSILTFRIPYYFGPLNITKDRQFDWIIKKEGKENERILPWNANEIVDVDKTADEFIKRMRNFCTYFPDEPVMAKNSLTVSKYEVLNEINKLRINDHLIKRDMKDKMLHTLFMDHKSISANAMKKWLVKNQYFSNTDDIKIEGFQKENACSTSLTPWIDFTKIFGKINESNYDFIEKIIYDVTVFEDKKILRRRLKKEYDLDEEKIKKILKLKYSGWSRLSKKLLSGIKTKYKDSTRTPETVLEVMERTNMNLMQVINDEKLGFKKTIDDANSTSVSGKFSYAEVQELAGSPAIKRGIWQALLIVDEIKKIMKHEPAHVYIEFARNEDEKERKDSFVNQMLKLYKDYDFEDETEKEANKHLKGEDAKSKIRSERLKLYYTQMGKCMYTGKSLDIDRLDTYQVDHIVPQSLLKDDSIDNKVLVLSSENQRKLDDLVIPSSIRNKMYGFWEKLFNNKIISPKKFYSLIKTEFNEKDQERFINRQIVETRQITKHVAQIIDNHYENTKVVTVRADLSHQFRERYHIYKNRDINDFHHAHDAYIATILGTYIGHRFESLDAKYIYGEYKRIFRNQKNKGKEMKKNNDGFILNSMRNIYADKDTGEIVWDPNYIDRIKKCFYYKDCFVTKKLEENNGTFFNVTVLPNDTNSDKDNTLATVPVNKYRSNVNKYGGFSGVNSFIVAIKGKKKKGKKVIEVNKLTGIPLMYKNADEEIKINYLKQAEDLEEVQIGKEILKNQLIEKDGGLYYIVAPTEIINAKQLILNESQTKLVCEIYKAMKYKNYDNLDSEKIIDLYRLLINKMELYYPEYRKQLVKKFEDRYEQLKVISIEEKCNIIKQILATLHCNSSIGKIMYSDFKISTTIGRLNGRTISLDDISFIAESPTGMYSKKYKL

SEQ ID NO: 36 - protein, 1288 aa, Enterococcus faecalis
MRLFEEGHTAEDRRLKRTARRRISRRRNRLRYLQAFFEEAMTDLDENFFARLQESFLVPEDKKWHRHPIFAKLEDEVAYHETYPTIYHLRKKLADSSEQADLRLIYLALAHIVKYRGHFLIEGKLSTENTSVKDQFQQFMVIYNQTFVNGESRLVSAPLPESVLIEEELTEKASRTKKSEKVLQQFPQEKANGLFGQFLKLMVGNKADFKKVFGLEEEAKITYASESYEEDLEGILAKVGDEYSDVFLAAKNVYDAVELSTILADSDKKSHAKLSSSMIVRFTEHQEDLKKFKRFIRENCPDEYDNLFKNEQKDGYAGYIAHAGKVSQLKFYQYVKKIIQDIAGAEYFLEKIAQENFLRKQRTFDNGVIPHQIHLAELQAIIHRQAAYYPFLKENQEKIEQLVTFRIPYYVGPLSKGDASTFAWLKRQSEEPIRPWNLQETVDLDQSATAFIERMTNFDTYLPSEKVLPKHSLLYEKFMVFNELTKISYTDDRGIKANFSGKEKEKIFDYLFKTRRKVKKKDIIQFYRNEYNTEIVTLSGLEEDQFNASFSTYQDLLKCGLTRAELDHPDNAEKLEDIIKILTIFEDRQRIRTQLSTFKGQFSAEVLKKLERKHYTGWGRLSKKLINGIYDKESGKTILDYLVKDDGVSKHYNRNFMQLINDSQLSFKNAIQKAQSSEHEETLSETVNELAGSPAIKKGIYQSLKIVDELVAIMGYAPKRIVVEMARENQTTSTGKRRSIQRLKIVEKAMAEIGSNLLKEQPTTNEQLRDTRLFLYYMQNGKDMYTGDELSLHRLSHYDIDHIIPQSFMKDDSLDNLVLVGSTENRGKSDDVPSKEVVKDMKAYWEKLYAAGLISQRKFQRLTKGEQGGLTLEDKAHFIQRQLVETRQITKNVAGILDQRYNAKSKEKKVQIITLKASLTSQFRSIFGLYKVREVNDYHHGQDAYLNCVVATTLLKVYPNLAPEFVYGEYPKFQTFKENKATAKAIIYTNLLRFFTEDEPRFTKDGEILWSNSYLKTIKKELNYHQMNIVKKVEVQKGGFSKESIKPKGPSNKLIPVKNGLDPQKYGGFDSPVVAYTVLFTHEKGKKPLIKQEILGITIMEKTRFEQNPILFLEEKGFLRPRVLMKLPKYTLYEFPEGRRRLLASAKEAQKGNQMVLPEHLLTLLYHAKQCLLPNQSESLAYVEQHQPEFQEILERVVDFAEVHTLAKSKVQQIVKLFEANQTADVKEIAASFIQLMQFNAMGAPSTFKFFQKDIERARYTSIKEIFDATIIYQSPTGLYETRRKVVD

SEQ ID NO: 37 - protein, 1052 aa, Staphylococcus aureus
KRNYILGLDIGITSVGYGIIDYETRDVIDAGVRLFKEANVENNEGRRSKRGARRLKRRRRHRIQRVKKLLFDYNLLTDHSELSGINPYEARVKGLSQKLSEEEFSAALLHLAKRRGVHNVNEVEEDTGNELSTKEQISRNSKALEEKYVAELQLERLKKDGEVRGSINRFKTSDYVKEAKQLLKVQKAYHQLDQSFIDTYIDLLETRRTYYEGPGEGSPFGWKDIKEWYEMLMGHCTYFPEELRSVKYAYNADLYNALNDLNNLVITRDENEKLEYYEKFQIIENVFKQKKKPTLKQIAKEILVNEEDIKGYRVTSTGKPEFTNLKVYHDIKDITARKEIIENAELLDQIAKILTIYQSSEDIQEELTNLNSELTQEEIEQISNLKGYTGTHNLSLKAINLILDELWHTNDNQIAIFNRLKLVPKKVDLSQQKEIPTTLVDDFILSPVVKRSFIQSIKVINAIIKKYGLPNDIIIELAREKNSKDAQKMINEMQKRNRQTNERIEEIIRTTGKENAKYLIEKIKLHDMQEGKCLYSLEAIPLEDLLNNPFNYEVDHIIPRSVSFDNSFNNKVLVKQEENSKKGNRTPFQYLSSSDSKISYETFKKHILNLAKGKGRISKTKKEYLLEERDINRFSVQKDFINRNLVDTRYATRGLMNLLRSYFRVNNLDVKVKSINGGFTSFLRRKWKFKKERNKGYKHHAEDALIIANADFIFKEWKKLDKAKKVMENQMFEEKQAESMPEIETEQEYKEIFITPHQIKHIKDFKDYKYSHRVDKKPNRELINDTLYSTRKDDKGNTLIVNNLNGLYDKDNDKLKKLINKSPEKLLMYHHDPQTYQKLKLIMEQYGDEKNPLYKYYEETGNYLTKYSKKDNGPVIKKIKYYGNKLNAHLDITDDYPNSRNKVVKLSLKPYRFDVYLDNGVYKFVTVKNLDVIKKENYYEVNSKCYEEAKKLKKISNQAEFIASFYNNDLIKINGELYRVIGVNNDLLNRIEVNMIDITYREYLENMNDKRPPRIIKTIASKTQSIKKYSTDILGNLYEVKSKKHPQIIKKG

SEQ ID NO: 38 - protein, 1082 aa, Geobacillus thermodenitrificans
MKYKIGLDIGITSIGWAVINLDIPRIEDLGVRIFDRAENPKTGESLALPRRLARSARRRLRRRKHRLERIRRLFVREGILTKEELNKLFEKKHEIDVWQLRVEALDRKLNNDELARILLHLAKRRGFRSNRKSERTNKENSTMLKHIEENQSILSSYRTVAEMVVKDPKFSLHKRNKEDNYTNTVARDDLEREIKLIFAKQREYGNIVCTEAFEHEYISIWASQRPFASKDDIEKKVGFCTFEPKEKRAPKATYTFQSFTVWEHINKLRLVSPGGIRALTDDERRLIYKQAFHKNKITFHDVRTLLNLPDDTRFKGLLYDRNTTLKENEKVRFLELGAYHKIRKAIDSVYGKGAAKSFRPIDFDTFGYALTMFKDDTDIRSYLRNEYEQNGKRMENLADKVYDEELIEELLNLSFSKFGHLSLKALRNILPYMEQGEVYSTACERAGYTFTGPKKKQKTVLLPNIPPIANPVVMRALTQARKVVNAIIKKYGSPVSIHIELARELSQSFDERRKMQKEQEGNRKKNETAIRQLVEYGLTLNPTGLDIVKFKLWSEQNGKCAYSLQPIEIERLLEPGYTEVDHVIPYSRSLDDSYTNKVLVLTKENREKGNRTPAEYLGLGSERWQQFETFVLTNKQFSKKKRDRLLRLHYDENEENEFKNRNLNDTRYISRFLANFIREHLKFADSDDKQKVYTVNGRITAHLRSRWNFNKNREESNLHHAVDAAIVACTTPSDIARVTAFYQRREQNKELSKKTDPQFPQPWPHFADELQARLSKNPKESIKALNLGNYDNEKLESLQPVFVSRMPKRSITGAAHQETLRRYIGIDERSGKIQTVVKKKLSEIQLDKTGHFPMYGKESDPRTYEAIRQRLLEHNNDPKKAFQEPLYKPKKNGELGPIIRTIKIIDTTNQVIPLNDGKTVAYNSNIVRVDVFEKDGKYYCVPIYTIDMMKGILPNKAIEPNKPYSEWKEMTEDYTFRFSLYPNDLIRIEFPREKTIKTAVGEEIKIKDLFAYYQTIDSSNGGLSLVSHDNNFSLRSIGSRTLKRFEKYQVDVLGNIYKVRGEKRVGVASSSHSKAGETIRPL

SEQ ID NO: 39 - protein, 1375 aa, Streptococcus canis
MEKKYSIGLDIGTNSVGWAVITDDYKVPSKKFKVLGNTNRKSIKKNLMGALLFDSGETAEATRLKRTARRRYTRRKNRIRYLQEIFANEMAKLDDSFFQRLEESFLVEEDKKNERHPIFGNLADEVAYHRNYPTIYHLRKKLADSPEKADLRLIYLALAHIIKFRGHFLIEGKLNAENSDVAKLFYQLIQTYNQLFEESPLDEIEVDAKGILSARLSKSKRLEKLIAVFPNEKKNGLFGNIIALALGLTPNFKSNFDLTEDAKLQLSKDTYDDDLDELLGQIGDQYADLFSAAKNLSDAILLSDILRSNSEVTKAPLSASMVKRYDEHHQDLALLKTLVRQQFPEKYAEIFKDDTKNGYAGYVGIGIKHRKRTTKLATQEEFYKFIKPILEKMDGAEELLAKLNRDDLLRKQRTFDNGSIPHQIHLKELHAILRRQEEFYPFLKENREKIEKILTFRIPYYVGPLARGNSRFAWLTRKSEEAITPWNFEEVVDKGASAQSFIERMTNFDEQLPNKKVLPKHSLLYEYFTVYNELTKVKYVTERMRKPEFLSGEQKKAIVDLLFKTNRKVTVKQLKEDYFKKIECFDSVEIIGVEDRFNASLGTYHDLLKIIKDKDFLDNEENEDILEDIVLTLTLFEDREMIEERLKTYAHLFDDKVMKQLKRRHYTGWGRLSRKMINGIRDKQSGKTILDFLKSDGFSNRNFMQLIHDDSLTFKEEIEKAQVSGQGDSLHEQIADLAGSPAIKKGILQTVKIVDELVKVMGHKPENIVIEMARENQTTTKGLQQSRERKKRIEEGIKELESQILKENPVENTQLQNEKLYLYYLQNGRDMYVDQELDINRLSDYDVDHIVPQSFIKDDSIDNKVLTRSVENRGKSDNVPSEEVVKKMKNYWRQLLNAKLITQRKFDNLTKAERGGLSEADKAGFIKRQLVETRQITKHVARILDSRMNTKRDKNDKPIREVKVITLKSKLVSDFRKDFQLYKVRDINNYHHAHDAYLNAVVGTALIKKYPKLESEFVYGDYKVYDVRKMIAKSEQEIGKATAKRFFYSNIMNFFKTEVKLANGEIRKRPLIETNGETGEVVWNKEKDFATVRKVLAMPQVNIVKKTEVQTGGFSKESILSKRESAKLIPRKKGWDTRKYGGFGSPTVAYSILVVAKVEKGKAKKLKSVKVLVGITIMEKGSYEKDPIGFLEAKGYKDIKKELIFKLPKYSLFELENGRRRMLASATELQKANELVLPQHLVRLLYYTQNISATTGSNNLGYIEQHREEFKEIFEKIIDFSEKYILKNKVNSNLKSSFDEQFAVSDSILLSNSFVSLLKYTSFGASGGFTFLDLDVKQGRLRYQTVTEVLDATLIYQSITGLYETRTDLSQLGGD

SEQ ID NO: 40 - protein, 1368 aa, Streptococcus pyogenes
  SITE 10: note = misc_feature - Xaa can be any naturally occurring amino acid
  SITE 840: note = misc_feature - Xaa can be any naturally occurring amino acid
MDKKYSIGLXIGTNSVGWAVITDEYKVPSKKFKVLGNTDRHSIKKNLIGALLFDSGETAEATRLKRTARRRYTRRKNRICYLQEIFSNEMAKVDDSFFHRLEESFLVEEDKKHERHPIFGNIVDEVAYHEKYPTIYHLRKKLVDSTDKADLRLIYLALAHMIKFRGHFLIEGDLNPDNSDVDKLFIQLVQTYNQLFEENPINASGVDAKAILSARLSKSRRLENLIAQLPGEKKNGLFGNLIALSLGLTPNFKSNFDLAEDAKLQLSKDTYDDDLDNLLAQIGDQYADLFLAAKNLSDAILLSDILRVNTEITKAPLSASMIKRYDEHHQDLTLLKALVRQQLPEKYKEIFFDQSKNGYAGYIDGGASQEEFYKFIKPILEKMDGTEELLVKLNREDLLRKQRTFDNGSIPHQIHLGELHAILRRQEDFYPFLKDNREKIEKILTFRIPYYVGPLARGNSRFAWMTRKSEETITPWNFEEVVDKGASAQSFIERMTNFDKNLPNEKVLPKHSLLYEYFTVYNELTKVKYVTEGMRKPAFLSGEQKKAIVDLLFKTNRKVTVKQLKEDYFKKIECFDSVEISGVEDRFNASLGTYHDLLKIIKDKDFLDNEENEDILEDIVLTLTLFEDREMIEERLKTYAHLFDDKVMKQLKRRRYTGWGRLSRKLINGIRDKQSGKTILDFLKSDGFANRNFMQLIHDDSLTFKEDIQKAQVSGQGDSLHEHIANLAGSPAIKKGILQTVKVVDELVKVMGRHKPENIVIEMARENQTTQKGQKNSRERMKRIEEGIKELGSQILKEHPVENTQLQNEKLYLYYLQNGRDMYVDQELDINRLSDYDVDXIVPQSFLKDDSIDNKVLTRSDKNRGKSDNVPSEEVVKKMKNYWRQLLNAKLITQRKFDNLTKAERGGLSELDKAGFIKRQLVETRQITKHVAQILDSRMNTKYDENDKLIREVKVITLKSKLVSDFRKDFQFYKVREINNYHHAHDAYLNAVVGTALIKKYPKLESEFVYGDYKVYDVRKMIAKSEQEIGKATAKYFFYSNIMNFFKTEITLANGEIRKRPLIETNGETGEIVWDKGRDFATVRKVLSMPQVNIVKKTEVQTGGFSKESILPKRNSDKLIARKKDWDPKKYGGFDSPTVAYSVLVVAKVEKGKSKKLKSVKELLGITIMERSSFEKNPIDFLEAKGYKEVKKDLIIKLPKYSLFELENGRKRMLASAGELQKGNELALPSKYVNFLYLASHYEKLKGSPEDNEQKQLFVEQHKHYLDEIIEQISEFSKRVILADANLDKVLSAYNKHRDKPIREQAENIIHLFTLTNLGAPAAFKYFDTTIDRKRYTSTKEVLDATLIHQSITGLYETRIDLSQLGGD

SEQ ID NO: 41 - protein, 1368 aa, Streptococcus pyogenes
MDKKYSIGLAIGTNSVGWAVITDEYKVPSKKFKVLGNTDRHSIKKNLIGALLFDSGETAEATRLKRTARRRYTRRKNRICYLQEIFSNEMAKVDDSFFHRLEESFLVEEDKKHERHPIFGNIVDEVAYHEKYPTIYHLRKKLVDSTDKADLRLIYLALAHMIKFRGHFLIEGDLNPDNSDVDKLFIQLVQTYNQLFEENPINASGVDAKAILSARLSKSRRLENLIAQLPGEKKNGLFGNLIALSLGLTPNFKSNFDLAEDAKLQLSKDTYDDDLDNLLAQIGDQYADLFLAAKNLSDAILLSDILRVNTEITKAPLSASMIKRYDEHHQDLTLLKALVRQQLPEKYKEIFFDQSKNGYAGYIDGGASQEEFYKFIKPILEKMDGTEELLVKLNREDLLRKQRTFDNGSIPHQIHLGELHAILRRQEDFYPFLKDNREKIEKILTFRIPYYVGPLARGNSRFAWMTRKSEETITPWNFEEVVDKGASAQSFIERMTNFDKNLPNEKVLPKHSLLYEYFTVYNELTKVKYVTEGMRKPAFLSGEQKKAIVDLLFKTNRKVTVKQLKEDYFKKIECFDSVEISGVEDRFNASLGTYHDLLKIIKDKDFLDNEENEDILEDIVLTLTLFEDREMIEERLKTYAHLFDDKVMKQLKRRRYTGWGRLSRKLINGIRDKQSGKTILDFLKSDGFANRNFMQLIHDDSLTFKEDIQKAQVSGQGDSLHEHIANLAGSPAIKKGILQTVKVVDELVKVMGRHKPENIVIEMARENQTTQKGQKNSRERMKRIEEGIKELGSQILKEHPVENTQLQNEKLYLYYLQNGRDMYVDQELDINRLSDYDVDAIVPQSFLKDDSIDNKVLTRSDKNRGKSDNVPSEEVVKKMKNYWRQLLNAKLITQRKFDNLTKAERGGLSELDKAGFIKRQLVETRQITKHVAQILDSRMNTKYDENDKLIREVKVITLKSKLVSDFRKDFQFYKVREINNYHHAHDAYLNAVVGTALIKKYPKLESEFVYGDYKVYDVRKMIAKSEQEIGKATAKYFFYSNIMNFFKTEITLANGEIRKRPLIETNGETGEIVWDKGRDFATVRKVLSMPQVNIVKKTEVQTGGFSKESILPKRNSDKLIARKKDWDPKKYGGFDSPTVAYSVLVVAKVEKGKSKKLKSVKELLGITIMERSSFEKNPIDFLEAKGYKEVKKDLIIKLPKYSLFELENGRKRMLASAGELQKGNELALPSKYVNFLYLASHYEKLKGSPEDNEQKQLFVEQHKHYLDEIIEQISEFSKRVILADANLDKVLSAYNKHRDKPIREQAENIIHLFTLTNLGAPAAFKYFDTTIDRKRYTSTKEVLDATLIHQSITGLYETRIDLSQLGGD

SEQ ID NO: 42 - protein, 1368 aa, Streptococcus pyogenes
  SITE 10: note = misc_feature - Xaa can be any naturally occurring amino acid
MDKKYSIGLXIGTNSVGWAVITDEYKVPSKKFKVLGNTDRHSIKKNLIGALLFDSGETAEATRLKRTARRRYTRRKNRICYLQEIFSNEMAKVDDSFFHRLEESFLVEEDKKHERHPIFGNIVDEVAYHEKYPTIYHLRKKLVDSTDKADLRLIYLALAHMIKFRGHFLIEGDLNPDNSDVDKLFIQLVQTYNQLFEENPINASGVDAKAILSARLSKSRRLENLIAQLPGEKKNGLFGNLIALSLGLTPNFKSNFDLAEDAKLQLSKDTYDDDLDNLLAQIGDQYADLFLAAKNLSDAILLSDILRVNTEITKAPLSASMIKRYDEHHQDLTLLKALVRQQLPEKYKEIFFDQSKNGYAGYIDGGASQEEFYKFIKPILEKMDGTEELLVKLNREDLLRKQRTFDNGSIPHQIHLGELHAILRRQEDFYPFLKDNREKIEKILTFRIPYYVGPLARGNSRFAWMTRKSEETITPWNFEEVVDKGASAQSFIERMTNFDKNLPNEKVLPKHSLLYEYFTVYNELTKVKYVTEGMRKPAFLSGEQKKAIVDLLFKTNRKVTVKQLKEDYFKKIECFDSVEISGVEDRFNASLGTYHDLLKIIKDKDFLDNEENEDILEDIVLTLTLFEDREMIEERLKTYAHLFDDKVMKQLKRRRYTGWGRLSRKLINGIRDKQSGKTILDFLKSDGFANRNFMQLIHDDSLTFKEDIQKAQVSGQGDSLHEHIANLAGSPAIKKGILQTVKVVDELVKVMGRHKPENIVIEMARENQTTQKGQKNSRERMKRIEEGIKELGSQILKEHPVENTQLQNEKLYLYYLQNGRDMYVDQELDINRLSDYDVDHIVPQSFLKDDSIDNKVLTRSDKNRGKSDNVPSEEVVKKMKNYWRQLLNAKLITQRKFDNLTKAERGGLSELDKAGFIKRQLVETRQITKHVAQILDSRMNTKYDENDKLIREVKVITLKSKLVSDFRKDFQFYKVREINNYHHAHDAYLNAVVGTALIKKYPKLESEFVYGDYKVYDVRKMIAKSEQEIGKATAKYFFYSNIMNFFKTEITLANGEIRKRPLIETNGETGEIVWDKGRDFATVRKVLSMPQVNIVKKTEVQTGGFSKESILPKRNSDKLIARKKDWDPKKYGGFDSPTVAYSVLVVAKVEKGKSKKLKSVKELLGITIMERSSFEKNPIDFLEAKGYKEVKKDLIIKLPKYSLFELENGRKRMLASAGELQKGNELALPSKYVNFLYLASHYEKLKGSPEDNEQKQLFVEQHKHYLDEIIEQISEFSKRVILADANLDKVLSAYNKHRDKPIREQAENIIHLFTLTNLGAPAAFKYFDTTIDRKRYTSTKEVLDATLIHQSITGLYETRIDLSQLGGD

SEQ ID NO: 43 - protein, 1368 aa, Streptococcus pyogenes
  SITE 762: note = misc_feature - Xaa can be any naturally occurring amino acid
MDKKYSIGLDIGTNSVGWAVITDEYKVPSKKFKVLGNTDRHSIKKNLIGALLFDSGETAEATRLKRTARRRYTRRKNRICYLQEIFSNEMAKVDDSFFHRLEESFLVEEDKKHERHPIFGNIVDEVAYHEKYPTIYHLRKKLVDSTDKADLRLIYLALAHMIKFRGHFLIEGDLNPDNSDVDKLFIQLVQTYNQLFEENPINASGVDAKAILSARLSKSRRLENLIAQLPGEKKNGLFGNLIALSLGLTPNFKSNFDLAEDAKLQLSKDTYDDDLDNLLAQIGDQYADLFLAAKNLSDAILLSDILRVNTEITKAPLSASMIKRYDEHHQDLTLLKALVRQQLPEKYKEIFFDQSKNGYAGYIDGGASQEEFYKFIKPILEKMDGTEELLVKLNREDLLRKQRTFDNGSIPHQIHLGELHAILRRQEDFYPFLKDNREKIEKILTFRIPYYVGPLARGNSRFAWMTRKSEETITPWNFEEVVDKGASAQSFIERMTNFDKNLPNEKVLPKHSLLYEYFTVYNELTKVKYVTEGMRKPAFLSGEQKKAIVDLLFKTNRKVTVKQLKEDYFKKIECFDSVEISGVEDRFNASLGTYHDLLKIIKDKDFLDNEENEDILEDIVLTLTLFEDREMIEERLKTYAHLFDDKVMKQLKRRRYTGWGRLSRKLINGIRDKQSGKTILDFLKSDGFANRNFMQLIHDDSLTFKEDIQKAQVSGQGDSLHEHIANLAGSPAIKKGILQTVKVVDELVKVMGRHKPENIVIXMARENQTTQKGQKNSRERMKRIEEGIKELGSQILKEHPVENTQLQNEKLYLYYLQNGRDMYVDQELDINRLSDYDVDHIVPQSFLKDDSIDNKVLTRSDKNRGKSDNVPSEEVVKKMKNYWRQLLNAKLITQRKFDNLTKAERGGLSELDKAGFIKRQLVETRQITKHVAQILDSRMNTKYDENDKLIREVKVITLKSKLVSDFRKDFQFYKVREINNYHHAHDAYLNAVVGTALIKKYPKLESEFVYGDYKVYDVRKMIAKSEQEIGKATAKYFFYSNIMNFFKTEITLANGEIRKRPLIETNGETGEIVWDKGRDFATVRKVLSMPQVNIVKKTEVQTGGFSKESILPKRNSDKLIARKKDWDPKKYGGFDSPTVAYSVLVVAKVEKGKSKKLKSVKELLGITIMERSSFEKNPIDFLEAKGYKEVKKDLIIKLPKYSLFELENGRKRMLASAGELQKGNELALPSKYVNFLYLASHYEKLKGSPEDNEQKQLFVEQHKHYLDEIIEQISEFSKRVILADANLDKVLSAYNKHRDKPIREQAENIIHLFTLTNLGAPAAFKYFDTTIDRKRYTSTKEVLDATLIHQSITGLYETRIDLSQLGGD

SEQ ID NO: 44 - protein, 1368 aa, Streptococcus pyogenes
  SITE 983: note = misc_feature - Xaa can be any naturally occurring amino acid
MDKKYSIGLDIGTNSVGWAVITDEYKVPSKKFKVLGNTDRHSIKKNLIGALLFDSGETAEATRLKRTARRRYTRRKNRICYLQEIFSNEMAKVDDSFFHRLEESFLVEEDKKHERHPIFGNIVDEVAYHEKYPTIYHLRKKLVDSTDKADLRLIYLALAHMIKFRGHFLIEGDLNPDNSDVDKLFIQLVQTYNQLFEENPINASGVDAKAILSARLSKSRRLENLIAQLPGEKKNGLFGNLIALSLGLTPNFKSNFDLAEDAKLQLSKDTYDDDLDNLLAQIGDQYADLFLAAKNLSDAILLSDILRVNTEITKAPLSASMIKRYDEHHQDLTLLKALVRQQLPEKYKEIFFDQSKNGYAGYIDGGASQEEFYKFIKPILEKMDGTEELLVKLNREDLLRKQRTFDNGSIPHQIHLGELHAILRRQEDFYPFLKDNREKIEKILTFRIPYYVGPLARGNSRFAWMTRKSEETITPWNFEEVVDKGASAQSFIERMTNFDKNLPNEKVLPKHSLLYEYFTVYNELTKVKYVTEGMRKPAFLSGEQKKAIVDLLFKTNRKVTVKQLKEDYFKKIECFDSVEISGVEDRFNASLGTYHDLLKIIKDKDFLDNEENEDILEDIVLTLTLFEDREMIEERLKTYAHLFDDKVMKQLKRRRYTGWGRLSRKLINGIRDKQSGKTILDFLKSDGFANRNFMQLIHDDSLTFKEDIQKAQVSGQGDSLHEHIANLAGSPAIKKGILQTVKVVDELVKVMGRHKPENIVIEMARENQTTQKGQKNSRERMKRIEEGIKELGSQILKEHPVENTQLQNEKLYLYYLQNGRDMYVDQELDINRLSDYDVDHIVPQSFLKDDSIDNKVLTRSDKNRGKSDNVPSEEVVKKMKNYWRQLLNAKLITQRKFDNLTKAERGGLSELDKAGFIKRQLVETRQITKHVAQILDSRMNTKYDENDKLIREVKVITLKSKLVSDFRKDFQFYKVREINNYHXAHDAYLNAVVGTALIKKYPKLESEFVYGDYKVYDVRKMIAKSEQEIGKATAKYFFYSNIMNFFKTEITLANGEIRKRPLIETNGETGEIVWDKGRDFATVRKVLSMPQVNIVKKTEVQTGGFSKESILPKRNSDKLIARKKDWDPKKYGGFDSPTVAYSVLVVAKVEKGKSKKLKSVKELLGITIMERSSFEKNPIDFLEAKGYKEVKKDLIIKLPKYSLFELENGRKRMLASAGELQKGNELALPSKYVNFLYLASHYEKLKGSPEDNEQKQLFVEQHKHYLDEIIEQISEFSKRVILADANLDKVLSAYNKHRDKPIREQAENIIHLFTLTNLGAPAAFKYFDTTIDRKRYTSTKEVLDATLIHQSITGLYETRIDLSQLGGD

SEQ ID NO: 45 - protein, 1368 aa, Streptococcus pyogenes
  SITE 986: note = misc_feature - Xaa can be any naturally occurring amino acid
MDKKYSIGLDIGTNSVGWAVITDEYKVPSKKFKVLGNTDRHSIKKNLIGALLFDSGETAEATRLKRTARRRYTRRKNRICYLQEIFSNEMAKVDDSFFHRLEESFLVEEDKKHERHPIFGNIVDEVAYHEKYPTIYHLRKKLVDSTDKADLRLIYLALAHMIKFRGHFLIEGDLNPDNSDVDKLFIQLVQTYNQLFEENPINASGVDAKAILSARLSKSRRLENLIAQLPGEKKNGLFGNLIALSLGLTPNFKSNFDLAEDAKLQLSKDTYDDDLDNLLAQIGDQYADLFLAAKNLSDAILLSDILRVNTEITKAPLSASMIKRYDEHHQDLTLLKALVRQQLPEKYKEIFFDQSKNGYAGYIDGGASQEEFYKFIKPILEKMDGTEELLVKLNREDLLRKQRTFDNGSIPHQIHLGELHAILRRQEDFYPFLKDNREKIEKILTFRIPYYVGPLARGNSRFAWMTRKSEETITPWNFEEVVDKGASAQSFIERMTNFDKNLPNEKVLPKHSLLYEYFTVYNELTKVKYVTEGMRKPAFLSGEQKKAIVDLLFKTNRKVTVKQLKEDYFKKIECFDSVEISGVEDRFNASLGTYHDLLKIIKDKDFLDNEENEDILEDIVLTLTLFEDREMIEERLKTYAHLFDDKVMKQLKRRRYTGWGRLSRKLINGIRDKQSGKTILDFLKSDGFANRNFMQLIHDDSLTFKEDIQKAQVSGQGDSLHEHIANLAGSPAIKKGILQTVKVVDELVKVMGRHKPENIVIEMARENQTTQKGQKNSRERMKRIEEGIKELGSQILKEHPVENTQLQNEKLYLYYLQNGRDMYVDQELDINRLSDYDVDHIVPQSFLKDDSIDNKVLTRSDKNRGKSDNVPSEEVVKKMKNYWRQLLNAKLITQRKFDNLTKAERGGLSELDKAGFIKRQLVETRQITKHVAQILDSRMNTKYDENDKLIREVKVITLKSKLVSDFRKDFQFYKVREINNYHHAHXAYLNAVVGTALIKKYPKLESEFVYGDYKVYDVRKMIAKSEQEIGKATAKYFFYSNIMNFFKTEITLANGEIRKRPLIETNGETGEIVWDKGRDFATVRKVLSMPQVNIVKKTEVQTGGFSKESILPKRNSDKLIARKKDWDPKKYGGFDSPTVAYSVLVVAKVEKGKSKKLKSVKELLGITIMERSSFEKNPIDFLEAKGYKEVKKDLIIKLPKYSLFELENGRKRMLASAGELQKGNELALPSKYVNFLYLASHYEKLKGSPEDNEQKQLFVEQHKHYLDEIIEQISEFSKRVILADANLDKVLSAYNKHRDKPIREQAENIIHLFTLTNLGAPAAFKYFDTTIDRKRYTSTKEVLDATLIHQSITGLYETRIDLSQLGGD

SEQ ID NO: 46 - protein, 1368 aa, Streptococcus pyogenes
MDKKYSIGLAIGTNSVGWAVITDEYKVPSKKFKVLGNTDRHSIKKNLIGALLFDSGETAEATRLKRTARRRYTRRKNRICYLQEIFSNEMAKVDDSFFHRLEESFLVEEDKKHERHPIFGNIVDEVAYHEKYPTIYHLRKKLVDSTDKADLRLIYLALAHMIKFRGHFLIEGDLNPDNSDVDKLFIQLVQTYNQLFEENPINASGVDAKAILSARLSKSRRLENLIAQLPGEKKNGLFGNLIALSLGLTPNFKSNFDLAEDAKLQLSKDTYDDDLDNLLAQIGDQYADLFLAAKNLSDAILLSDILRVNTEITKAPLSASMIKRYDEHHQDLTLLKALVRQQLPEKYKEIFFDQSKNGYAGYIDGGASQEEFYKFIKPILEKMDGTEELLVKLNREDLLRKQRTFDNGSIPHQIHLGELHAILRRQEDFYPFLKDNREKIEKILTFRIPYYVGPLARGNSRFAWMTRKSEETITPWNFEEVVDKGASAQSFIERMTNFDKNLPNEKVLPKHSLLYEYFTVYNELTKVKYVTEGMRKPAFLSGEQKKAIVDLLFKTNRKVTVKQLKEDYFKKIECFDSVEISGVEDRFNASLGTYHDLLKIIKDKDFLDNEENEDILEDIVLTLTLFEDREMIEERLKTYAHLFDDKVMKQLKRRRYTGWGRLSRKLINGIRDKQSGKTILDFLKSDGFANRNFMQLIHDDSLTFKEDIQKAQVSGQGDSLHEHIANLAGSPAIKKGILQTVKVVDELVKVMGRHKPENIVIEMARENQTTQKGQKNSRERMKRIEEGIKELGSQILKEHPVENTQLQNEKLYLYYLQNGRDMYVDQELDINRLSDYDVDHIVPQSFLKDDSIDNKVLTRSDKNRGKSDNVPSEEVVKKMKNYWRQLLNAKLITQRKFDNLTKAERGGLSELDKAGFIKRQLVETRQITKHVAQILDSRMNTKYDENDKLIREVKVITLKSKLVSDFRKDFQFYKVREINNYHHAHDAYLNAVVGTALIKKYPKLESEFVYGDYKVYDVRKMIAKSEQEIGKATAKYFFYSNIMNFFKTEITLANGEIRKRPLIETNGETGEIVWDKGRDFATVRKVLSMPQVNIVKKTEVQTGGFSKESILPKRNSDKLIARKKDWDPKKYGGFDSPTVAYSVLVVAKVEKGKSKKLKSVKELLGITIMERSSFEKNPIDFLEAKGYKEVKKDLIIKLPKYSLFELENGRKRMLASAGELQKGNELALPSKYVNFLYLASHYEKLKGSPEDNEQKQLFVEQHKHYLDEIIEQISEFSKRVILADANLDKVLSAYNKHRDKPIREQAENIIHLFTLTNLGAPAAFKYFDTTIDRKRYTSTKEVLDATLIHQSITGLYETRIDLSQLGGD

SEQ ID NO: 47 - protein, 1368 aa, Streptococcus pyogenes
MDKKYSIGLDIGTNSVGWAVITDEYKVPSKKFKVLGNTDRHSIKKNLIGALLFDSGETAEATRLKRTARRRYTRRKNRICYLQEIFSNEMAKVDDSFFHRLEESFLVEEDKKHERHPIFGNIVDEVAYHEKYPTIYHLRKKLVDSTDKADLRLIYLALAHMIKFRGHFLIEGDLNPDNSDVDKLFIQLVQTYNQLFEENPINASGVDAKAILSARLSKSRRLENLIAQLPGEKKNGLFGNLIALSLGLTPNFKSNFDLAEDAKLQLSKDTYDDDLDNLLAQIGDQYADLFLAAKNLSDAILLSDILRVNTEITKAPLSASMIKRYDEHHQDLTLLKALVRQQLPEKYKEIFFDQSKNGYAGYIDGGASQEEFYKFIKPILEKMDGTEELLVKLNREDLLRKQRTFDNGSIPHQIHLGELHAILRRQEDFYPFLKDNREKIEKILTFRIPYYVGPLARGNSRFAWMTRKSEETITPWNFEEVVDKGASAQSFIERMTNFDKNLPNEKVLPKHSLLYEYFTVYNELTKVKYVTEGMRKPAFLSGEQKKAIVDLLFKTNRKVTVKQLKEDYFKKIECFDSVEISGVEDRFNASLGTYHDLLKIIKDKDFLDNEENEDILEDIVLTLTLFEDREMIEERLKTYAHLFDDKVMKQLKRRRYTGWGRLSRKLINGIRDKQSGKTILDFLKSDGFANRNFMQLIHDDSLTFKEDIQKAQVSGQGDSLHEHIANLAGSPAIKKGILQTVKVVDELVKVMGRHKPENIVIAMARENQTTQKGQKNSRERMKRIEEGIKELGSQILKEHPVENTQLQNEKLYLYYLQNGRDMYVDQELDINRLSDYDVDHIVPQSFLKDDSIDNKVLTRSDKNRGKSDNVPSEEVVKKMKNYWRQLLNAKLITQRKFDNLTKAERGGLSELDKAGFIKRQLVETRQITKHVAQILDSRMNTKYDENDKLIREVKVITLKSKLVSDFRKDFQFYKVREINNYHHAHDAYLNAVVGTALIKKYPKLESEFVYGDYKVYDVRKMIAKSEQEIGKATAKYFFYSNIMNFFKTEITLANGEIRKRPLIETNGETGEIVWDKGRDFATVRKVLSMPQVNIVKKTEVQTGGFSKESILPKRNSDKLIARKKDWDPKKYGGFDSPTVAYSVLVVAKVEKGKSKKLKSVKELLGITIMERSSFEKNPIDFLEAKGYKEVKKDLIIKLPKYSLFELENGRKRMLASAGELQKGNELALPSKYVNFLYLASHYEKLKGSPEDNEQKQLFVEQHKHYLDEIIEQISEFSKRVILADANLDKVLSAYNKHRDKPIREQAENIIHLFTLTNLGAPAAFKYFDTTIDRKRYTSTKEVLDATLIHQSITGLYETRIDLSQLGGD

SEQ ID NO: 48 - protein, 1368 aa, Streptococcus pyogenes
MDKKYSIGLDIGTNSVGWAVITDEYKVPSKKFKVLGNTDRHSIKKNLIGALLFDSGETAEATRLKRTARRRYTRRKNRICYLQEIFSNEMAKVDDSFFHRLEESFLVEEDKKHERHPIFGNIVDEVAYHEKYPTIYHLRKKLVDSTDKADLRLIYLALAHMIKFRGHFLIEGDLNPDNSDVDKLFIQLVQTYNQLFEENPINASGVDAKAILSARLSKSRRLENLIAQLPGEKKNGLFGNLIALSLGLTPNFKSNFDLAEDAKLQLSKDTYDDDLDNLLAQIGDQYADLFLAAKNLSDAILLSDILRVNTEITKAPLSASMIKRYDEHHQDLTLLKALVRQQLPEKYKEIFFDQSKNGYAGYIDGGASQEEFYKFIKPILEKMDGTEELLVKLNREDLLRKQRTFDNGSIPHQIHLGELHAILRRQEDFYPFLKDNREKIEKILTFRIPYYVGPLARGNSRFAWMTRKSEETITPWNFEEVVDKGASAQSFIERMTNFDKNLPNEKVLPKHSLLYEYFTVYNELTKVKYVTEGMRKPAFLSGEQKKAIVDLLFKTNRKVTVKQLKEDYFKKIECFDSVEISGVEDRFNASLGTYHDLLKIIKDKDFLDNEENEDILEDIVLTLTLFEDREMIEERLKTYAHLFDDKVMKQLKRRRYTGWGRLSRKLINGIRDKQSGKTILDFLKSDGFANRNFMQLIHDDSLTFKEDIQKAQVSGQGDSLHEHIANLAGSPAIKKGILQTVKVVDELVKVMGRHKPENIVIEMARENQTTQKGQKNSRERMKRIEEGIKELGSQILKEHPVENTQLQNEKLYLYYLQNGRDMYVDQELDINRLSDYDVDHIVPQSFLKDDSIDNKVLTRSDKNRGKSDNVPSEEVVKKMKNYWRQLLNAKLITQRKFDNLTKAERGGLSELDKAGFIKRQLVETRQITKHVAQILDSRMNTKYDENDKLIREVKVITLKSKLVSDFRKDFQFYKVREINNYHAAHDAYLNAVVGTALIKKYPKLESEFVYGDYKVYDVRKMIAKSEQEIGKATAKYFFYSNIMNFFKTEITLANGEIRKRPLIETNGETGEIVWDKGRDFATVRKVLSMPQVNIVKKTEVQTGGFSKESILPKRNSDKLIARKKDWDPKKYGGFDSPTVAYSVLVVAKVEKGKSKKLKSVKELLGITIMERSSFEKNPIDFLEAKGYKEVKKDLIIKLPKYSLFELENGRKRMLASAGELQKGNELALPSKYVNFLYLASHYEKLKGSPEDNEQKQLFVEQHKHYLDEIIEQISEFSKRVILADANLDKVLSAYNKHRDKPIREQAENIIHLFTLTNLGAPAAFKYFDTTIDRKRYTSTKEVLDATLIHQSITGLYETRIDLSQLGGD

SEQ ID NO: 49 - protein, 1368 aa, Streptococcus pyogenes
MDKKYSIGLDIGTNSVGWAVITDEYKVPSKKFKVLGNTDRHSIKKNLIGALLFDSGETAEATRLKRTARRRYTRRKNRICYLQEIFSNEMAKVDDSFFHRLEESFLVEEDKKHERHPIFGNIVDEVAYHEKYPTIYHLRKKLVDSTDKADLRLIYLALAHMIKFRGHFLIEGDLNPDNSDVDKLFIQLVQTYNQLFEENPINASGVDAKAILSARLSKSRRLENLIAQLPGEKKNGLFGNLIALSLGLTPNFKSNFDLAEDAKLQLSKDTYDDDLDNLLAQIGDQYADLFLAAKNLSDAILLSDILRVNTEITKAPLSASMIKRYDEHHQDLTLLKALVRQQLPEKYKEIFFDQSKNGYAGYIDGGASQEEFYKFIKPILEKMDGTEELLVKLNREDLLRKQRTFDNGSIPHQIHLGELHAILRRQEDFYPFLKDNREKIEKILTFRIPYYVGPLARGNSRFAWMTRKSEETITPWNFEEVVDKGASAQSFIERMTNFDKNLPNEKVLPKHSLLYEYFTVYNELTKVKYVTEGMRKPAFLSGEQKKAIVDLLFKTNRKVTVKQLKEDYFKKIECFDSVEISGVEDRFNASLGTYHDLLKIIKDKDFLDNEENEDILEDIVLTLTLFEDREMIEERLKTYAHLFDDKVMKQLKRRRYTGWGRLSRKLINGIRDKQSGKTILDFLKSDGFANRNFMQLIHDDSLTFKEDIQKAQVSGQGDSLHEHIANLAGSPAIKKGILQTVKVVDELVKVMGRHKPENIVIEMARENQTTQKGQKNSRERMKRIEEGIKELGSQILKEHPVENTQLQNEKLYLYYLQNGRDMYVDQELDINRLSDYDVDHIVPQSFLKDDSIDNKVLTRSDKNRGKSDNVPSEEVVKKMKNYWRQLLNAKLITQRKFDNLTKAERGGLSELDKAGFIKRQLVETRQITKHVAQILDSRMNTKYDENDKLIREVKVITLKSKLVSDFRKDFQFYKVREINNYHHAHAAYLNAVVGTALIKKYPKLESEFVYGDYKVYDVRKMIAKSEQEIGKATAKYFFYSNIMNFFKTEITLANGEIRKRPLIETNGETGEIVWDKGRDFATVRKVLSMPQVNIVKKTEVQTGGFSKESILPKRNSDKLIARKKDWDPKKYGGFDSPTVAYSVLVVAKVEKGKSKKLKSVKELLGITIMERSSFEKNPIDFLEAKGYKEVKKDLIIKLPKYSLFELENGRKRMLASAGELQKGNELALPSKYVNFLYLASHYEKLKGSPEDNEQKQLFVEQHKHYLDEIIEQISEFSKRVILADANLDKVLSAYNKHRDKPIREQAENIIHLFTLTNLGAPAAFKYFDTTIDRKRYTSTKEVLDATLIHQSITGLYETRIDLSQLGGD

SEQ ID NO: 50 - protein, 1368 aa, Streptococcus pyogenes
  SITE 840: note = misc_feature - Xaa can be any naturally occurring amino acid
MDKKYSIGLDIGTNSVGWAVITDEYKVPSKKFKVLGNTDRHSIKKNLIGALLFDSGETAEATRLKRTARRRYTRRKNRICYLQEIFSNEMAKVDDSFFHRLEESFLVEEDKKHERHPIFGNIVDEVAYHEKYPTIYHLRKKLVDSTDKADLRLIYLALAHMIKFRGHFLIEGDLNPDNSDVDKLFIQLVQTYNQLFEENPINASGVDAKAILSARLSKSRRLENLIAQLPGEKKNGLFGNLIALSLGLTPNFKSNFDLAEDAKLQLSKDTYDDDLDNLLAQIGDQYADLFLAAKNLSDAILLSDILRVNTEITKAPLSASMIKRYDEHHQDLTLLKALVRQQLPEKYKEIFFDQSKNGYAGYIDGGASQEEFYKFIKPILEKMDGTEELLVKLNREDLLRKQRTFDNGSIPHQIHLGELHAILRRQEDFYPFLKDNREKIEKILTFRIPYYVGPLARGNSRFAWMTRKSEETITPWNFEEVVDKGASAQSFIERMTNFDKNLPNEKVLPKHSLLYEYFTVYNELTKVKYVTEGMRKPAFLSGEQKKAIVDLLFKTNRKVTVKQLKEDYFKKIECFDSVEISGVEDRFNASLGTYHDLLKIIKDKDFLDNEENEDILEDIVLTLTLFEDREMIEERLKTYAHLFDDKVMKQLKRRRYTGWGRLSRKLINGIRDKQSGKTILDFLKSDGFANRNFMQLIHDDSLTFKEDIQKAQVSGQGDSLHEHIANLAGSPAIKKGILQTVKVVDELVKVMGRHKPENIVIEMARENQTTQKGQKNSRERMKRIEEGIKELGSQILKEHPVENTQLQNEKLYLYYLQNGRDMYVDQELDINRLSDYDVDXIVPQSFLKDDSIDNKVLTRSDKNRGKSDNVPSEEVVKKMKNYWRQLLNAKLITQRKFDNLTKAERGGLSELDKAGFIKRQLVETRQITKHVAQILDSRMNTKYDENDKLIREVKVITLKSKLVSDFRKDFQFYKVREINNYHHAHDAYLNAVVGTALIKKYPKLESEFVYGDYKVYDVRKMIAKSEQEIGKATAKYFFYSNIMNFFKTEITLANGEIRKRPLIETNGETGEIVWDKGRDFATVRKVLSMPQVNIVKKTEVQTGGFSKESILPKRNSDKLIARKKDWDPKKYGGFDSPTVAYSVLVVAKVEKGKSKKLKSVKELLGITIMERSSFEKNPIDFLEAKGYKEVKKDLIIKLPKYSLFELENGRKRMLASAGELQKGNELALPSKYVNFLYLASHYEKLKGSPEDNEQKQLFVEQHKHYLDEIIEQISEFSKRVILADANLDKVLSAYNKHRDKPIREQAENIIHLFTLTNLGAPAAFKYFDTTIDRKRYTSTKEVLDATLIHQSITGLYETRIDLSQLGGD

SEQ ID NO: 51 - protein, 1368 aa, Streptococcus pyogenes
MDKKYSIGLDIGTNSVGWAVITDEYKVPSKKFKVLGNTDRHSIKKNLIGALLFDSGETAEATRLKRTARRRYTRRKNRICYLQEIFSNEMAKVDDSFFHRLEESFLVEEDKKHERHPIFGNIVDEVAYHEKYPTIYHLRKKLVDSTDKADLRLIYLALAHMIKFRGHFLIEGDLNPDNSDVDKLFIQLVQTYNQLFEENPINASGVDAKAILSARLSKSRRLENLIAQLPGEKKNGLFGNLIALSLGLTPNFKSNFDLAEDAKLQLSKDTYDDDLDNLLAQIGDQYADLFLAAKNLSDAILLSDILRVNTEITKAPLSASMIKRYDEHHQDLTLLKALVRQQLPEKYKEIFFDQSKNGYAGYIDGGASQEEFYKFIKPILEKMDGTEELLVKLNREDLLRKQRTFDNGSIPHQIHLGELHAILRRQEDFYPFLKDNREKIEKILTFRIPYYVGPLARGNSRFAWMTRKSEETITPWNFEEVVDKGASAQSFIERMTNFDKNLPNEKVLPKHSLLYEYFTVYNELTKVKYVTEGMRKPAFLSGEQKKAIVDLLFKTNRKVTVKQLKEDYFKKIECFDSVEISGVEDRFNASLGTYHDLLKIIKDKDFLDNEENEDILEDIVLTLTLFEDREMIEERLKTYAHLFDDKVMKQLKRRRYTGWGRLSRKLINGIRDKQSGKTILDFLKSDGFANRNFMQLIHDDSLTFKEDIQKAQVSGQGDSLHEHIANLAGSPAIKKGILQTVKVVDELVKVMGRHKPENIVIEMARENQTTQKGQKNSRERMKRIEEGIKELGSQILKEHPVENTQLQNEKLYLYYLQNGRDMYVDQELDINRLSDYDVDAIVPQSFLKDDSIDNKVLTRSDKNRGKSDNVPSEEVVKKMKNYWRQLLNAKLITQRKFDNLTKAERGGLSELDKAGFIKRQLVETRQITKHVAQILDSRMNTKYDENDKLIREVKVITLKSKLVSDFRKDFQFYKVREINNYHHAHDAYLNAVVGTALIKKYPKLESEFVYGDYKVYDVRKMIAKSEQEIGKATAKYFFYSNIMNFFKTEITLANGEIRKRPLIETNGETGEIVWDKGRDFATVRKVLSMPQVNIVKKTEVQTGGFSKESILPKRNSDKLIARKKDWDPKKYGGFDSPTVAYSVLVVAKVEKGKSKKLKSVKELLGITIMERSSFEKNPIDFLEAKGYKEVKKDLIIKLPKYSLFELENGRKRMLASAGELQKGNELALPSKYVNFLYLASHYEKLKGSPEDNEQKQLFVEQHKHYLDEIIEQISEFSKRVILADANLDKVLSAYNKHRDKPIREQAENIIHLFTLTNLGAPAAFKYFDTTIDRKRYTSTKEVLDATLIHQSITGLYETRIDLSQLGGD

SEQ ID NO: 52 - protein, 1368 aa, Streptococcus pyogenes
  SITE 864: note = misc_feature - Xaa can be any naturally occurring amino acid
MDKKYSIGLDIGTNSVGWAVITDEYKVPSKKFKVLGNTDRHSIKKNLIGALLFDSGETAEATRLKRTARRRYTRRKNRICYLQEIFSNEMAKVDDSFFHRLEESFLVEEDKKHERHPIFGNIVDEVAYHEKYPTIYHLRKKLVDSTDKADLRLIYLALAHMIKFRGHFLIEGDLNPDNSDVDKLFIQLVQTYNQLFEENPINASGVDAKAILSARLSKSRRLENLIAQLPGEKKNGLFGNLIALSLGLTPNFKSNFDLAEDAKLQLSKDTYDDDLDNLLAQIGDQYADLFLAAKNLSDAILLSDILRVNTEITKAPLSASMIKRYDEHHQDLTLLKALVRQQLPEKYKEIFFDQSKNGYAGYIDGGASQEEFYKFIKPILEKMDGTEELLVKLNREDLLRKQRTFDNGSIPHQIHLGELHAILRRQEDFYPFLKDNREKIEKILTFRIPYYVGPLARGNSRFAWMTRKSEETITPWNFEEVVDKGASAQSFIERMTNFDKNLPNEKVLPKHSLLYEYFTVYNELTKVKYVTEGMRKPAFLSGEQKKAIVDLLFKTNRKVTVKQLKEDYFKKIECFDSVEISGVEDRFNASLGTYHDLLKIIKDKDFLDNEENEDILEDIVLTLTLFEDREMIEERLKTYAHLFDDKVMKQLKRRRYTGWGRLSRKLINGIRDKQSGKTILDFLKSDGFANRNFMQLIHDDSLTFKEDIQKAQVSGQGDSLHEHIANLAGSPAIKKGILQTVKVVDELVKVMGRHKPENIVIEMARENQTTQKGQKNSRERMKRIEEGIKELGSQILKEHPVENTQLQNEKLYLYYLQNGRDMYVDQELDINRLSDYDVDHIVPQSFLKDDSIDNKVLTRSDKNXGKSDNVPSEEVVKKMKNYWRQLLNAKLITQRKFDNLTKAERGGLSELDKAGFIKRQLVETRQITKHVAQILDSRMNTKYDENDKLIREVKVITLKSKLVSDFRKDFQFYKVREINNYHHAHDAYLNAVVGTALIKKYPKLESEFVYGDYKVYDVRKMIAKSEQEIGKATAKYFFYSNIMNFFKTEITLANGEIRKRPLIETNGETGEIVWDKGRDFATVRKVLSMPQVNIVKKTEVQTGGFSKESILPKRNSDKLIARKKDWDPKKYGGFDSPTVAYSVLVVAKVEKGKSKKLKSVKELLGITIMERSSFEKNPIDFLEAKGYKEVKKDLIIKLPKYSLFELENGRKRMLASAGELQKGNELALPSKYVNFLYLASHYEKLKGSPEDNEQKQLFVEQHKHYLDEIIEQISEFSKRVILADANLDKVLSAYNKHRDKPIREQAENIIHLFTLTNLGAPAAFKYFDTTIDRKRYTSTKEVLDATLIHQSITGLYETRIDLSQLGGD

SEQ ID NO: 53 - protein, 1368 aa, Streptococcus pyogenes
MDKKYSIGLDIGTNSVGWAVITDEYKVPSKKFKVLGNTDRHSIKKNLIGALLFDSGETAEATRLKRTARRRYTRRKNRICYLQEIFSNEMAKVDDSFFHRLEESFLVEEDKKHERHPIFGNIVDEVAYHEKYPTIYHLRKKLVDSTDKADLRLIYLALAHMIKFRGHFLIEGDLNPDNSDVDKLFIQLVQTYNQLFEENPINASGVDAKAILSARLSKSRRLENLIAQLPGEKKNGLFGNLIALSLGLTPNFKSNFDLAEDAKLQLSKDTYDDDLDNLLAQIGDQYADLFLAAKNLSDAILLSDILRVNTEITKAPLSASMIKRYDEHHQDLTLLKALVRQQLPEKYKEIFFDQSKNGYAGYIDGGASQEEFYKFIKPILEKMDGTEELLVKLNREDLLRKQRTFDNGSIPHQIHLGELHAILRRQEDFYPFLKDNREKIEKILTFRIPYYVGPLARGNSRFAWMTRKSEETITPWNFEEVVDKGASAQSFIERMTNFDKNLPNEKVLPKHSLLYEYFTVYNELTKVKYVTEGMRKPAFLSGEQKKAIVDLLFKTNRKVTVKQLKEDYFKKIECFDSVEISGVEDRFNASLGTYHDLLKIIKDKDFLDNEENEDILEDIVLTLTLFEDREMIEERLKTYAHLFDDKVMKQLKRRRYTGWGRLSRKLINGIRDKQSGKTILDFLKSDGFANRNFMQLIHDDSLTFKEDIQKAQVSGQGDSLHEHIANLAGSPAIKKGILQTVKVVDELVKVMGRHKPENIVIEMARENQTTQKGQKNSRERMKRIEEGIKELGSQILKEHPVENTQLQNEKLYLYYLQNGRDMYVDQELDINRLSDYDVDHIVPQSFLKDDSIDNKVLTRSDKNAGKSDNVPSEEVVKKMKNYWRQLLNAKLITQRKFDNLTKAERGGLSELDKAGFIKRQLVETRQITKHVAQILDSRMNTKYDENDKLIREVKVITLKSKLVSDFRKDFQFYKVREINNYHHAHDAYLNAVVGTALIKKYPKLESEFVYGDYKVYDVRKMIAKSEQEIGKATAKYFFYSNIMNFFKTEITLANGEIRKRPLIETNGETGEIVWDKGRDFATVRKVLSMPQVNIVKKTEVQTGGFSKESILPKRNSDKLIARKKDWDPKKYGGFDSPTVAYSVLVVAKVEKGKSKKLKSVKELLGITIMERSSFEKNPIDFLEAKGYKEVKKDLIIKLPKYSLFELENGRKRMLASAGELQKGNELALPSKYVNFLYLASHYEKLKGSPEDNEQKQLFVEQHKHYLDEIIEQISEFSKRVILADANLDKVLSAYNKHRDKPIREQAENIIHLFTLTNLGAPAAFKYFDTTIDRKRYTSTKEVLDATLIHQSITGLYETRIDLSQLGGD

SEQ ID NO: 54 - protein, 1367 aa, Streptococcus pyogenes
  SITE 839: note = misc_feature - Xaa can be any naturally occurring amino acid
DKKYSIGLDIGTNSVGWAVITDEYKVPSKKFKVLGNTDRHSIKKNLIGALLFDSGETAEATRLKRTARRRYTRRKNRICYLQEIFSNEMAKVDDSFFHRLEESFLVEEDKKHERHPIFGNIVDEVAYHEKYPTIYHLRKKLVDSTDKADLRLIYLALAHMIKFRGHFLIEGDLNPDNSDVDKLFIQLVQTYNQLFEENPINASGVDAKAILSARLSKSRRLENLIAQLPGEKKNGLFGNLIALSLGLTPNFKSNFDLAEDAKLQLSKDTYDDDLDNLLAQIGDQYADLFLAAKNLSDAILLSDILRVNTEITKAPLSASMIKRYDEHHQDLTLLKALVRQQLPEKYKEIFFDQSKNGYAGYIDGGASQEEFYKFIKPILEKMDGTEELLVKLNREDLLRKQRTFDNGSIPHQIHLGELHAILRRQEDFYPFLKDNREKIEKILTFRIPYYVGPLARGNSRFAWMTRKSEETITPWNFEEVVDKGASAQSFIERMTNFDKNLPNEKVLPKHSLLYEYFTVYNELTKVKYVTEGMRKPAFLSGEQKKAIVDLLFKTNRKVTVKQLKEDYFKKIECFDSVEISGVEDRFNASLGTYHDLLKIIKDKDFLDNEENEDILEDIVLTLTLFEDREMIEERLKTYAHLFDDKVMKQLKRRRYTGWGRLSRKLINGIRDKQSGKTILDFLKSDGFANRNFMQLIHDDSLTFKEDIQKAQVSGQGDSLHEHIANLAGSPAIKKGILQTVKVVDELVKVMGRHKPENIVIEMARENQTTQKGQKNSRERMKRIEEGIKELGSQILKEHPVENTQLQNEKLYLYYLQNGRDMYVDQELDINRLSDYDVDXIVPQSFLKDDSIDNKVLTRSDKNRGKSDNVPSEEVVKKMKNYWRQLLNAKLITQRKFDNLTKAERGGLSELDKAGFIKRQLVETRQITKHVAQILDSRMNTKYDENDKLIREVKVITLKSKLVSDFRKDFQFYKVREINNYHHAHDAYLNAVVGTALIKKYPKLESEFVYGDYKVYDVRKMIAKSEQEIGKATAKYFFYSNIMNFFKTEITLANGEIRKRPLIETNGETGEIVWDKGRDFATVRKVLSMPQVNIVKKTEVQTGGFSKESILPKRNSDKLIARKKDWDPKKYGGFDSPTVAYSVLVVAKVEKGKSKKLKSVKELLGITIMERSSFEKNPIDFLEAKGYKEVKKDLIIKLPKYSLFELENGRKRMLASAGELQKGNELALPSKYVNFLYLASHYEKLKGSPEDNEQKQLFVEQHKHYLDEIIEQISEFSKRVILADANLDKVLSAYNKHRDKPIREQAENIIHLFTLTNLGAPAAFKYFDTTIDRKRYTSTKEVLDATLIHQSITGLYETRIDLSQLGGD

SEQ ID NO: 55 - protein, 1367 aa, Streptococcus pyogenes
DKKYSIGLDIGTNSVGWAVITDEYKVPSKKFKVLGNTDRHSIKKNLIGALLFDSGETAEATRLKRTARRRYTRRKNRICYLQEIFSNEMAKVDDSFFHRLEESFLVEEDKKHERHPIFGNIVDEVAYHEKYPTIYHLRKKLVDSTDKADLRLIYLALAHMIKFRGHFLIEGDLNPDNSDVDKLFIQLVQTYNQLFEENPINASGVDAKAILSARLSKSRRLENLIAQLPGEKKNGLFGNLIALSLGLTPNFKSNFDLAEDAKLQLSKDTYDDDLDNLLAQIGDQYADLFLAAKNLSDAILLSDILRVNTEITKAPLSASMIKRYDEHHQDLTLLKALVRQQLPEKYKEIFFDQSKNGYAGYIDGGASQEEFYKFIKPILEKMDGTEELLVKLNREDLLRKQRTFDNGSIPHQIHLGELHAILRRQEDFYPFLKDNREKIEKILTFRIPYYVGPLARGNSRFAWMTRKSEETITPWNFEEVVDKGASAQSFIERMTNFDKNLPNEKVLPKHSLLYEYFTVYNELTKVKYVTEGMRKPAFLSGEQKKAIVDLLFKTNRKVTVKQLKEDYFKKIECFDSVEISGVEDRFNASLGTYHDLLKIIKDKDFLDNEENEDILEDIVLTLTLFEDREMIEERLKTYAHLFDDKVMKQLKRRRYTGWGRLSRKLINGIRDKQSGKTILDFLKSDGFANRNFMQLIHDDSLTFKEDIQKAQVSGQGDSLHEHIANLAGSPAIKKGILQTVKVVDELVKVMGRHKPENIVIEMARENQTTQKGQKNSRERMKRIEEGIKELGSQILKEHPVENTQLQNEKLYLYYLQNGRDMYVDQELDINRLSDYDVDAIVPQSFLKDDSIDNKVLTRSDKNRGKSDNVPSEEVVKKMKNYWRQLLNAKLITQRKFDNLTKAERGGLSELDKAGFIKRQLVETRQITKHVAQILDSRMNTKYDENDKLIREVKVITLKSKLVSDFRKDFQFYKVREINNYHHAHDAYLNAVVGTALIKKYPKLESEFVYGDYKVYDVRKMIAKSEQEIGKATAKYFFYSNIMNFFKTEITLANGEIRKRPLIETNGETGEIVWDKGRDFATVRKVLSMPQVNIVKKTEVQTGGFSKESILPKRNSDKLIARKKDWDPKKYGGFDSPTVAYSVLVVAKVEKGKSKKLKSVKELLGITIMERSSFEKNPIDFLEAKGYKEVKKDLIIKLPKYSLFELENGRKRMLASAGELQKGNELALPSKYVNFLYLASHYEKLKGSPEDNEQKQLFVEQHKHYLDEIIEQISEFSKRVILADANLDKVLSAYNKHRDKPIREQAENIIHLFTLTNLGAPAAFKYFDTTIDRKRYTSTKEVLDATLIHQSITGLYETRIDLSQLGGD

SEQ ID NO: 56 - protein, 1367 aa, Streptococcus pyogenes
  SITE 863: note = misc_feature - Xaa can be any naturally occurring amino acid
DKKYSIGLDIGTNSVGWAVITDEYKVPSKKFKVLGNTDRHSIKKNLIGALLFDSGETAEATRLKRTARRRYTRRKNRICYLQEIFSNEMAKVDDSFFHRLEESFLVEEDKKHERHPIFGNIVDEVAYHEKYPTIYHLRKKLVDSTDKADLRLIYLALAHMIKFRGHFLIEGDLNPDNSDVDKLFIQLVQTYNQLFEENPINASGVDAKAILSARLSKSRRLENLIAQLPGEKKNGLFGNLIALSLGLTPNFKSNFDLAEDAKLQLSKDTYDDDLDNLLAQIGDQYADLFLAAKNLSDAILLSDILRVNTEITKAPLSASMIKRYDEHHQDLTLLKALVRQQLPEKYKEIFFDQSKNGYAGYIDGGASQEEFYKFIKPILEKMDGTEELLVKLNREDLLRKQRTFDNGSIPHQIHLGELHAILRRQEDFYPFLKDNREKIEKILTFRIPYYVGPLARGNSRFAWMTRKSEETITPWNFEEVVDKGASAQSFIERMTNFDKNLPNEKVLPKHSLLYEYFTVYNELTKVKYVTEGMRKPAFLSGEQKKAIVDLLFKTNRKVTVKQLKEDYFKKIECFDSVEISGVEDRFNASLGTYHDLLKIIKDKDFLDNEENEDILEDIVLTLTLFEDREMIEERLKTYAHLFDDKVMKQLKRRRYTGWGRLSRKLINGIRDKQSGKTILDFLKSDGFANRNFMQLIHDDSLTFKEDIQKAQVSGQGDSLHEHIANLAGSPAIKKGILQTVKVVDELVKVMGRHKPENIVIEMARENQTTQKGQKNSRERMKRIEEGIKELGSQILKEHPVENTQLQNEKLYLYYLQNGRDMYVDQELDINRLSDYDVDHIVPQSFLKDDSIDNKVLTRSDKNXGKSDNVPSEEVVKKMKNYWRQLLNAKLITQRKFDNLTKAERGGLSELDKAGFIKRQLVETRQITKHVAQILDSRMNTKYDENDKLIREVKVITLKSKLVSDFRKDFQFYKVREINNYHHAHDAYLNAVVGTALIKKYPKLESEFVYGDYKVYDVRKMIAKSEQEIGKATAKYFFYSNIMNFFKTEITLANGEIRKRPLIETNGETGEIVWDKGRDFATVRKVLSMPQVNIVKKTEVQTGGFSKESILPKRNSDKLIARKKDWDPKKYGGFDSPTVAYSVLVVAKVEKGKSKKLKSVKELLGITIMERSSFEKNPIDFLEAKGYKEVKKDLIIKLPKYSLFELENGRKRMLASAGELQKGNELALPSKYVNFLYLASHYEKLKGSPEDNEQKQLFVEQHKHYLDEIIEQISEFSKRVILADANLDKVLSAYNKHRDKPIREQAENIIHLFTLTNLGAPAAFKYFDTTIDRKRYTSTKEVLDATLIHQSITGLYETRIDLSQLGGD

SEQ ID NO: 57 - protein, 1367 aa, Streptococcus pyogenes
DKKYSIGLDIGTNSVGWAVITDEYKVPSKKFKVLGNTDRHSIKKNLIGALLFDSGETAEATRLKRTARRRYTRRKNRICYLQEIFSNEMAKVDDSFFHRLEESFLVEEDKKHERHPIFGNIVDEVAYHEKYPTIYHLRKKLVDSTDKADLRLIYLALAHMIKFRGHFLIEGDLNPDNSDVDKLFIQLVQTYNQLFEENPINASGVDAKAILSARLSKSRRLENLIAQLPGEKKNGLFGNLIALSLGLTPNFKSNFDLAEDAKLQLSKDTYDDDLDNLLAQIGDQYADLFLAAKNLSDAILLSDILRVNTEITKAPLSASMIKRYDEHHQDLTLLKALVRQQLPEKYKEIFFDQSKNGYAGYIDGGASQEEFYKFIKPILEKMDGTEELLVKLNREDLLRKQRTFDNGSIPHQIHLGELHAILRRQEDFYPFLKDNREKIEKILTFRIPYYVGPLARGNSRFAWMTRKSEETITPWNFEEVVDKGASAQSFIERMTNFDKNLPNEKVLPKHSLLYEYFTVYNELTKVKYVTEGMRKPAFLSGEQKKAIVDLLFKTNRKVTVKQLKEDYFKKIECFDSVEISGVEDRFNASLGTYHDLLKIIKDKDFLDNEENEDILEDIVLTLTLFEDREMIEERLKTYAHLFDDKVMKQLKRRRYTGWGRLSRKLINGIRDKQSGKTILDFLKSDGFANRNFMQLIHDDSLTFKEDIQKAQVSGQGDSLHEHIANLAGSPAIKKGILQTVKVVDELVKVMGRHKPENIVIEMARENQTTQKGQKNSRERMKRIEEGIKELGSQILKEHPVENTQLQNEKLYLYYLQNGRDMYVDQELDINRLSDYDVDHIVPQSFLKDDSIDNKVLTRSDKNAGKSDNVPSEEVVKKMKNYWRQLLNAKLITQRKFDNLTKAERGGLSELDKAGFIKRQLVETRQITKHVAQILDSRMNTKYDENDKLIREVKVITLKSKLVSDFRKDFQFYKVREINNYHHAHDAYLNAVVGTALIKKYPKLESEFVYGDYKVYDVRKMIAKSEQEIGKATAKYFFYSNIMNFFKTEITLANGEIRKRPLIETNGETGEIVWDKGRDFATVRKVLSMPQVNIVKKTEVQTGGFSKESILPKRNSDKLIARKKDWDPKKYGGFDSPTVAYSVLVVAKVEKGKSKKLKSVKELLGITIMERSSFEKNPIDFLEAKGYKEVKKDLIIKLPKYSLFELENGRKRMLASAGELQKGNELALPSKYVNFLYLASHYEKLKGSPEDNEQKQLFVEQHKHYLDEIIEQISEFSKRVILADANLDKVLSAYNKHRDKPIREQAENIIHLFTLTNLGAPAAFKYFDTTIDRKRYTSTKEVLDATLIHQSITGLYETRIDLSQLGGD

SEQ ID NO: 58 - protein, 1053 aa, Staphylococcus aureus; identical to SEQ ID NO: 28

SEQ ID NO: 59 - protein, 1082 aa, Neisseria meningitidis
MAAFKPNSINYILGLDIGIASVGWAMVEIDEEENPIRLIDLGVRVFERAEVPKTGDSLAMARRLARSVRRLTRRRAHRLLRTRRLLKREGVLQAANFDENGLIKSLPNTPWQLRAAALDRKLTPLEWSAVLLHLIKHRGYLSQRKNEGETADKELGALLKGVAGNAHALQTGDFRTPAELALNKFEKESGHIRNQRSDYSHTFSRKDLQAELILLFEKQKEFGNPHVSGGLKEGIETLLMTQRPALSGDAVQKMLGHCTFEPAEPKAAKNTYTAERFIWLTKLNNLRILEQGSERPLTDTERATLMDEPYRKSKLTYAQARKLLGLEDTAFFKGLRYGKDNAEASTLMEMKAYHAISRALEKEGLKDKKSPLNLSPELQDEIGTAFSLFKTDEDITGRLKDRIQPEILEALLKHISFDKFVQISLKALRRIVPLMEQGKRYDEACAEIYGDHYGKKNTEEKIYLPPIPADEIRNPVVLRALSQARKVINGVVRRYGSPARIHIETAREVGKSFKDRKEIEKRQEENRKDREKAAAKFREYFPNFVGEPKSKDILKLRLYEQQHGKCLYSGKEINLGRLNEKGYVEIDAALPFSRTWDDSFNNKVLVLGSENQNKGNQTPYEYFNGKDNSREWQEFKARVETSRFPRSKKQRILLQKFDEDGFKERNLNDTRYVNRFLCQFVADRMRLTGKGKKRVFASNGQITNLLRGFWGLRKVRAENDRHHALDAVVVACSTVAMQQKITRFVRYKEMNAFDGKTIDKETGEVLHQKTHFPQPWEFFAQEVMIRVFGKPDGKPEFEEADTLEKLRTLLAEKLSSRPEAVHEYVTPLFVSRAPNRKMSGQGHMETVKSAKRLDEGVSVLRVPLTQLKLKDLEKMVNREREPKLYEALKARLEAHKDDPAKAFAEPFYKYDKAGNRTQQVKAVRVEQVQKTGVWVRNHNGIADNATMVRVDVFEKGDKYYLVPIYSWQVAKGILPDRAVVQGKDEEDWQLIDDSFNFKFSLHPNDLVEVITKKARMFGYFASCHRGTGNINIRIHDLDHKIGKNGILEGIGVKTALSFQKYQIDELGKEIRPCRLKKRPPVR

SEQ ID NO: 60 - protein, 984 aa, Campylobacter jejuni
MARILAFDIGISSIGWAFSENDELKDCGVRIFTKVENPKTGESLALPRRLARSARKRLARRKARLNHLKHLIANEFKLNYEDYQSFDESLAKAYKGSLISPYELRFRALNELLSKQDFARVILHIAKRRGYDDIKNSDDKEKGAILKAIKQNEEKLANYQSVGEYLYKEYFQKFKENSKEFTNVRNKKESYERCIAQSFLKDELKLIFKKQREFGFSFSKKFEEEVLSVAFYKRALKDFSHLVGNCSFFTDEKRAPKNSPLAFMFVALTRIINLLNNLKNTEGILYTKDDLNALLNEVLKNGTLTYKQTKKLLGLSDDYEFKGEKGTYFIEFKKYKEFIKALGEHNLSQDDLNEIAKDITLIKDEIKLKKALAKYDLNQNQIDSLSKLEFKDHLNISFKALKLVTPLMLEGKKYDEACNELNLKVAINEDKKDFLPAFNETYYKDEVTNPVVLRAIKEYRKVLNALLKKYGKVHKINIELAREVGKNHSQRAKIEKEQNENYKAKKDAELECEKLGLKINSKNILKLRLFKEQKEFCAYSGEKIKISDLQDEKMLEIDHIYPYSRSFDDSYMNKVLVFTKQNQEKLNQTPFEAFGNDSAKWQKIEVLAKNLPTKKQKRILDKNYKDKEQKNFKDRNLNDTRYIARLVLNYTKDYLDFLPLSDDENTKLNDTQKGSKVHVEAKSGMLTSALRHTWGFSAKDRNNHLHHAIDAVIIAYANNSIVKAFSDFKKEQESNSAELYAKKISELDYKNKRKFFEPFSGFRQKVLDKIDEIFVSKPERKKPSGALHEETFRKEEEFYQSYGGKEGVLKALELGKIRKVNGKIVKNGDMFRVDIFKHKKTNKFYAVPIYTMDFALKVLPNKAVARSKKGEIKDWILMDENYEFCFSLYKDSLILIQTKDMQEPEFVYYNAFTSSTVSLIVSKHDNKFETLSKNQKILFKNANEKEVIAKSIGIQNLKVFEKYIVSALGEVTKAEFRQREDFKK

SEQ ID NO: 61 - protein, 1087 aa, Geobacillus stearothermophilus
MRYKIGLDIGITSVGWAVMNLDIPRIEDLGVRIFDRAENPQTGESLALPRRLARSARRRLRRRKHRLERIRRLVIREGILTKEELDKLFEEKHEIDVWQLRVEALDRKLNNDELARVLLHLAKRRGFKSNRKSERSNKENSTMLKHIEENRAILSSYRTVGEMIVKDPKFALHKRNKGENYTNTIARDDLEREIRLIFSKQREFGNMSCTEEFENEYITIWASQRPVASKDDIEKKVGFCTFEPKEKRAPKATYTFQSFIAWEHINKLRLISPSGARGLTDEERRLLYEQAFQKNKITYHDIRTLLHLPDDTYFKGIVYDRGESRKQNENIRFLELDAYHQIRKAVDKVYGKGKSSSFLPIDFDTFGYALTLFKDDADIHSYLRNEYEQNGKRMPNLANKVYDNELIEELLNLSFTKFGHLSLKALRSILPYMEQGEVYSSACERAGYTFTGPKKKQKTMLLPNIPPIANPVVMRALTQARKVVNAIIKKYGSPVSIHIELARDLSQTFDERRKTKKEQDENRKKNETAIRQLMEYGLTLNPTGHDIVKFKLWSEQNGRCAYSLQPIEIERLLEPGYVEVDHVIPYSRSLDDSYTNKVLVLTRENREKGNRIPAEYLGVGTERWQQFETFVLTNKQFSKKKRDRLLRLHYDENEETEFKNRNLNDTRYISRFFANFIREHLKFAESDDKQKVYTVNGRVTAHLRSRWEFNKNREESDLHHAVDAVIVACTTPSDIAKVTAFYQRREQNKELAKKTEPHFPQPWPHFADELRARLSKHPKESIKALNLGNYDDQKLESLQPVFVSRMPKRSVTGAAHQETLRRYVGIDERSGKIQTVVKTKLSEIKLDASGHFPMYGKESDPRTYEAIRQRLLEHNNDPKKAFQEPLYKPKKNGEPGPVIRTVKIIDTKNQVIPLNDGKTVAYNSNIVRVDVFEKDGKYYCVPVYTMDIMKGILPNKAIEPNKPYSEWKEMTEDYTFRFSLYPNDLIRIELPREKTVKTAAGEEINVKDVFVYYKTIDSANGGLELISHDHRFSLRGVGSRTLKRFEKYQVDVLGNIYKVRGEKRVGLASSAHSKPGKTIRPLQSTRD

SEQ ID NO: 62 - protein, 1228 aa, unidentified
  REGION 1..1228: note = Lachnospiraceae bacterium
MSKLEKFTNCYSLSKTLRFKAIPVGKTQENIDNKRLLVEDEKRAEDYKGVKKLLDRYYLSFINDVLHSIKLKNLNNYISLFRKKTRTEKENKELENLEINLRKEIAKAFKGNEGYKSLFKKDIIETILPEFLDDKDEIALVNSFNGFTTAFTGFFDNRENMFSEEAKSTSIAFRCINENLTRYISNMDIFEKVDAIFDKHEVQEIKEKILNSDYDVEDFFEGEFFNFVLTQEGIDVYNAIIGGFVTESGEKIKGLNEYINLYNQKTKQKLPKFKPLYKQVLSDRESLSFYGEGYTSDEEVLEVFRNTLNKNSEIFSSIKKLEKLFKNFDEYSSAGIFVKNGPAISTISKDIFGEWNVIRDKWNAEYDDIHLKKKAVVTEKYEDDRRKSFKKIGSFSLEQLQEYADADLSVVEKLKEIIIQKVDEIYKVYGSSEKLFDADFVLEKSLKKNDAVVAIMKDLLDSVKSFENYIKAFFGEGKETNRDESFYGDFVLAYDILLKVDHIYDAIRNYVTQKPYSKDKFKLYFQNPQFMGGWDKDKETDYRATILRYGSKYYLAIMDKKYAKCLQKIDKDDVNGNYEKINYKLLPGPNKMLPKVFFSKKWMAYYNPSEDIQKIYKNGTFKKGDMFNLNDCHKLIDFFKDSISRYPKWSNAYDFNFSETEKYKDIAGFYREVEEQGYKVSFESASKKEVDKLVEEGKLYMFQIYNKDFSDKSHGTPNLHTMYFKLLFDENNHGQIRLSGGAELFMRRASLKKEELVVHPANSPIANKNPDNPKKTTTLSYDVYKDKRFSEDQYELHIPIAINKCPKNIFKINTEVRVLLKHDDNPYVIGIDRGERNLLYIVVVDGKGNIVEQYSLNEIINNFNGIRIKTDYHSLLDKKEKERFEARQNWTSIENIKELKAGYISQVVHKICELVEKYDAVIALEDLNSGFKNSRVKVEKQVYQKFEKMLIDKLNYMVDKKSNPCATGGALKGYQITNKFESFKSMSTQNGFIFYIPAWLTSKIDPSTGFVNLLKTKYTSIADSKKFISSFDRIMYVPEEDLFEFALDYKNFSRTDADYIKKWKLYSYGNRIRIFRNPKKNNVFDWEEVCLTSAYKELFNKYGINYQQGDIRALLCEQSDKAFYSSFMALMSLMLQMRNSITGRTDVDFLISPVKNSDGIFYDSRNYEAQENAILPKNADANGAYNIARKVLWAIGQFKKAEDEKLDKVKIAISNKEWLEYAQTSVKH

SEQ ID NO: 63 - protein, 1108 aa, unidentified
  REGION 1..1108: note = Bacillushisashii
MATRSFILKIEPNEEVKKGLWKTHEVLNHGIAYYMNILKLIRQEAIYEHHEQDPKNPKKVSKAEIQAELWDFVLKMQKCNSFTHEVDKDEVFNILRELYEELVPSSVEKKGEANQLSNKFLYPLVDPNSQSGKGTASSGRKPRWYNLKIAGDPSWEEEKKKWEEDKKKDPLAKILGKLAEYGLIPLFIPYTDSNEPIVKEIKWMEKSRNQSVRRLDKDMFIQALERFLSWESWNLKVKEEYEKVEKEYKTLEERIKEDIQALKALEQYEKERQEQLLRDTLNTNEYRLSKRGLRGWREIIQKWLKMDENEPSEKYLEVFKDYQRKHPREAGDYSVYEFLSKKENHFIWRNHPEYPYLYATFCEIDKKKKDAKQQATFTLADPINHPLWVRFEERSGSNLNKYRILTEQLHTEKLKKKLTVQLDRLIYPTESGGWEEKGKVDIVLLPSRQFYNQIFLDIEEKGKHAFTYKDESIKFPLKGTLGGARVQFDRDHLRRYPHKVESGNVGRIYFNMTVNIEPTESPVSKSLKIHRDDFPKVVNFKPKELTEWIKDSKGKKLKSGIESLEIGLRVMSIDLGQRQAAAASIFEVVDQKPDIEGKLFFPIKGTELYAVHRASFNIKLPGETLVKSREVLRKAREDNLKLMNQKLNFLRNVLHFQQFEDITEREKRVTKWISRQENSDVPLVYQDELIQIRELMYKPYKDWVAFLKQLHKRLEVEIGKEVKHWRKSLSDGRKGLYGISLKNIDEIDRTRKFLLRWSLRPTEPGEVRRLEPGQRFAIDQLNHLNALKEDRLKKMANTIIMHALGYCYDVRKKKWQAKNPACQIILFEDLSNYNPYEERSRFENSKLMKWSRREIPRQVALQGEIYGLQVGEVGAQFSSRFHAKTGSPGIRCSVVTKEKLQDNRFFKNLQREGRLTLDKIAVLKEGDLYPDKGGEKFISLSKDRKCVTTHADINAAQNLQKRFWTRTHGFYKVYCKAYQVDGQTVYIPESKDQKQKIIEEFGEGYFILKDGVYEWVNAGKLKIKKGSSKQSSSELVDSDILKDSFDLASELKGEKLMLYRDPSGNVFPSDKWMAAGVFFGKLERILISKLTNQYSISTIEDDSSKQSM

SEQ ID NO: 64 - protein, 1307 aa, unidentified
  REGION 1..1307: note = Acidaminococcus sp. (strain BV3L6)
MTQFEGFTNLYQVSKTLRFELIPQGKTLKHIQEQGFIEEDKARNDHYKELKPIIDRIYKTYADQCLQLVQLDWENLSAAIDSYRKEKTEETRNALIEEQATYRNAIHDYFIGRTDNLTDAINKRHAEIYKGLFKAELFNGKVLKQLGTVTTTEHENALLRSFDKFTTYFSGFYENRKNVFSAEDISTAIPHRIVQDNFPKFKENCHIFTRLITAVPSLREHFENVKKAIGIFVSTSIEEVFSFPFYNQLLTQTQIDLYNQLLGGISREAGTEKIKGLNEVLNLAIQKNDETAHIIASLPHRFIPLFKQILSDRNTLSFILEEFKSDEEVIQSFCKYKTLLRNENVLETAEALFNELNSIDLTHIFISHKKLETISSALCDHWDTLRNALYERRISELTGKITKSAKEKVQRSLKHEDINLQEIISAAGKELSEAFKQKTSEILSHAHAALDQPLPTTLKKQEEKEILKSQLDSLLGLYHLLDWFAVDESNEVDPEFSARLTGIKLEMEPSLSFYNKARNYATKKPYSVEKFKLNFQMPTLASGWDVNKEKNNGAILFVKNGLYYLGIMPKQKGRYKALSFEPTEKTSEGFDKMYYDYFPDAAKMIPKCSTQLKAVTAHFQTHTTPILLSNNFIEPLEITKEIYDLNNPEKEPKKFQTAYAKKTGDQKGYREALCKWIDFTRDFLSKYTKTTSIDLSSLRPSSQYKDLGEYYAELNPLLYHISFQRIAEKEIMDAVETGKLYLFQIYNKDFAKGHHGKPNLHTLYWTGLFSPENLAKTSIKLNGQAELFYRPKSRMKRMAHRLGEKMLNKKLKDQKTPIPDTLYQELYDYVNHRLSHDLSDEARALLPNVITKEVSHEIIKDRRFTSDKFFFHVPITLNYQAANSPSKFNQRVNAYLKEHPETPIIGIDRGERNLIYITVIDSTGKILEQRSLNTIQQFDYQKKLDNREKERVAARQAWSVVGTIKDLKQGYLSQVIHEIVDLMIHYQAVVVLENLNFGFKSKRTGIAEKAVYQQFEKMLIDKLNCLVLKDYPAEKVGGVLNPYQLTDQFTSFAKMGTQSGFLFYVPAPYTSKIDPLTGFVDPFVWKTIKNHESRKHFLEGFDFLHYDVKTGDFILHFKMNRNLSFQRGLPGFMPAWDIVFEKNETQFDAKGTPFIAGKRIVPVIENHRFTGRYRDLYPANELIALLEEKGIVFRDGSNILPKLLENDDSHAIDTMVALIRSVLQMRNSNAATGEDYINSPVRDLNGVCFDSRFQNPEWPMDADANGAYHIALKGQLLLNHLKESKDLKLQNGISNQDWLAYIQELRN

SEQ ID NO: 65 - protein, 1307 aa, synthetic construct
  REGION 1..1307: note = Synthetic
MTQFEGFTNLYQVSKTLRFELIPQGKTLKHIQEQGFIEEDKARNDHYKELKPIIDRIYKTYADQCLQLVQLDWENLSAAIDSYRKEKTEETRNALIEEQATYRNAIHDYFIGRTDNLTDAINKRHAEIYKGLFKAELFNGKVLKQLGTVTTTEHENALLRSFDKFTTYFSGFYENRKNVFSAEDISTAIPHRIVQDNFPKFKENCHIFTRLITAVPSLREHFENVKKAIGIFVSTSIEEVFSFPFYNQLLTQTQIDLYNQLLGGISREAGTEKIKGLNEVLNLAIQKNDETAHIIASLPHRFIPLFKQILSDRNTLSFILEEFKSDEEVIQSFCKYKTLLRNENVLETAEALFNELNSIDLTHIFISHKKLETISSALCDHWDTLRNALYERRISELTGKITKSAKEKVQRSLKHEDINLQEIISAAGKELSEAFKQKTSEILSHAHAALDQPLPTTLKKQEEKEILKSQLDSLLGLYHLLDWFAVDESNEVDPEFSARLTGIKLEMEPSLSFYNKARNYATKKPYSVEKFKLNFQMPTLASGWDVNKEKNNGAILFVKNGLYYLGIMPKQKGRYKALSFEPTEKTSEGFDKMYYDYFPDAAKMIPKCSTQLKAVTAHFQTHTTPILLSNNFIEPLEITKEIYDLNNPEKEPKKFQTAYAKKTGDQKGYREALCKWIDFTRDFLSKYTKTTSIDLSSLRPSSQYKDLGEYYAELNPLLYHISFQRIAEKEIMDAVETGKLYLFQIYNKDFAKGHHGKPNLHTLYWTGLFSPENLAKTSIKLNGQAELFYRPKSRMKRMAHRLGEKMLNKKLKDQKTPIPDTLYQELYDYVNHRLSHDLSDEARALLPNVITKEVSHEIIKDRRFTSDKFFFHVPITLNYQAANSPSKFNQRVNAYLKEHPETPIIGIDRGERNLIYITVIDSTGKILEQRSLNTIQQFDYQKKLDNREKERVAARQAWSVVGTIKDLKQGYLSQVIHEIVDLMIHYQAVVVLENLNFGFKSKRTGIAEKAVYQQFEKMLIDKLNCLVLKDYPAEKVGGVLNPYQLTDQFTSFAKMGTQSGFLFYVPAPYTSKIDPLTGFVDPFVWKTIKNHESRKHFLEGFDFLHYDVKTGDFILHFKMNRNLSFQRGLPGFMPAWDIVFEKNETQFDAKGTPFIAGKRIVPVIENHRFTGRYRDLYPANELIALLEEKGIVFRDGSNILPKLLENDDSHAIDTMVALIRSVLQMANSNAATGEDYINSPVRDLNGVCFDSRFQNPEWPMDADANGAYHIALKGQLLLNHLKESKDLKLQNGISNQDWLAYIQELRN

SEQ ID NO: 66 - protein, 1259 aa, unidentified
  REGION 1..1259: note = Lachnospiraceae bacterium GAM79
MNYKTGLEDFIGKESLSKTLRNALIPTESTKIHMEEMGVIRDDELRAEKQQELKEIMDDYYRTFIEEKLGQIQGIQWNSLFQKMEETMEDISVRKDLDKIQNEKRKEICCYFTSDKRFKDLFNAKLITDILPNFIKDNKEYTEEEKAEKEQTRVLFQRFATAFTNYFNQRRNNFSEDNISTAISFRIVNENSEIHLQNMRAFQRIEQQYPEEVCGMEEEYKDMLQEWQMKHIYSVDFYDRELTQPGIEYYNGICGKINEHMNQFCQKNRINKNDFRMKKLHKQILCKKSSYYEIPFRFESDQEVYDALNEFIKTMKKKEIIRRCVHLGQECDDYDLGKIYISSNKYEQISNALYGSWDTIRKCIKEEYMDALPGKGEKKEEKAEAAAKKEEYRSIADIDKIISLYGSEMDRTISAKKCITEICDMAGQISIDPLVCNSDIKLLQNKEKTTEIKTILDSFLHVYQWGQTFIVSDIIEKDSYFYSELEDVLEDFEGITTLYNHVRSYVTQKPYSTVKFKLHFGSPTLANGWSQSKEYDNNAILLMRDQKFYLGIFNVRNKPDKQIIKGHEKEEKGDYKKMIYNLLPGPSKMLPKVFITSRSGQETYKPSKHILDGYNEKRHIKSSPKFDLGYCWDLIDYYKECIHKHPDWKNYDFHFSDTKDYEDISGFYREVEMQGYQIKWTYISADEIQKLDEKGQIFLFQIYNKDFSVHSTGKDNLHTMYLKNLFSEENLKDIVLKLNGEAELFFRKASIKTPIVHKKGSVLVNRSYTQTVGNKEIRVSIPEEYYTEIYNYLNHIGKGKLSSEAQRYLDEGKIKSFTATKDIVKNYRYCCDHYFLHLPITINFKAKSDVAVNERTLAYIAKKEDIHIIGIDRGERNLLYISVVDVHGNIREQRSFNIVNGYDYQQKLKDREKSRDAARKNWEEIEKIKELKEGYLSMVIHYIAQLVVKYNAVVAMEDLNYGFKTGRFKVERQVYQKFETMLIEKLHYLVFKDREVCEEGGVLRGYQLTYIPESLKKVGKQCGFIFYVPAGYTSKIDPTTGFVNLFSFKNLTNRESRQDFVGKFDEIRYDRDKKMFEFSFDYNNYIKKGTILASTKWKVYTNGTRLKRIVVNGKYTSQSMEVELTDAMEKMLQRAGIEYHDGKDLKGQIVEKGIEAEIIDIFRLTVQMRNSRSESEDREYDRLISPVLNDKGEFFDTATADKTLPQDADANGAYCIALKGLYEVKQIKENWKENEQFPRNKLVQDNKTWFDFMQKKRYL

SEQ ID NO: 67 - protein, 1306 aa, Prevotella copri
MAKNFEDFKRLYSLSKTLRFEAKPIGATLDNIVKSGLLDEDEHRAASYVKVKKLIDEYHKVFIDRVLDDGCLPLENKGNNNSLAEYYESYVSRAQDEDAKKKFKEIQQNLRSVIAKKLTEDKAYANLFGNKLIESYKDKEDKKKIIDSDLIQFINTAESTQLDSMSQDEAKELVKEFWGFVTYFYGFFDNRKNMYTAEEKSTGIAYRLVNENLPKFIDNIEAFNRAITRPEIQENMGVLYSDFSEYLNVESIQEMFQLDYYNMLLTQKQIDVYNAIIGGKTDDEHDVKIKGINEYINLYNQQHKDDKLPKLKALFKQILSDRNAISWLPEEFNSDQEVLNAIKDCYERLAENVLGDKVLKSLLGSLADYSLDGIFIRNDLQLTDISQKMFGNWGVIQNAIMQNIKRVAPARKHKESEEDYEKRIAGIFKKADSFSISYINDCLNEADPNNAYFVENYFATFGAVNTPTMQRENLFALVQNAYTEVAALLHSDYPTVKHLAQDKANVSKIKALLDAIKSLQHFVKPLLGKGDESDKDERFYGELASLWAELDTVTPLYNMIRNYMTRKPYSQKKIKLNFENPQLLGGWDANKEKDYATIILRRNGLYYLAIMDKDSRKLLGKAMPSDGECYEKMVYKFFKDVTTMIPKCSTQLKDVQAYFKVNTDDYVLNSKAFNKPLTITKEVFDLNNVLYGKYKKFQKGYLTATGDNVGYTHAVNVWIKFCMDFLNSYDSTCIYDFSSLKPESYLSLDAFYQDANLLLYKLSFARASVSYINQLVEEGKMYLFQIYNKDFSEYSKGTPNMHTLYWKALFDERNLADVVYKLNGQAEMFYRKKSIENTHPTHPANHPILNKNKDNKKKESLFDYDLIKDRRYTVDKFMFHVPITMNFKSVGSENINQDVKAYLRHADDMHIIGIDRGERHLLYLVVIDLQGNIKEQYSLNEIVNEYNGNTYHTNYHDLLDVREEERLKARQSWQTIENIKELKEGYLSQVIHKITQLMVRYHAIVVLEDLSKGFMRSRQKVEKQVYQKFEKMLIDKLNYLVDKKTDVSTPGGLLNAYQLTCKSDSSQKLGKQSGFLFYIPAWNTSKIDPVTGFVNLLDTHSLNSKEKIKAFFSKFDAIRYNKDKKWFEFNLDYDKFGKKAEDTRTKWTLCTRGMRIDTFRNKEKNSQWDNQEVDLTTEMKSLLEHYYIDIHGNLKDAISAQTDKAFFTGLLHILKLTLQMRNSITGTETDYLVSPVADENGIFYDSRSCGNQLPENADANGAYNIARKGLMLIEQIKNAEDLNNVKFDISNKAWLNFAQQKPYKNG

SEQ ID NO: 68 - protein, 1142 aa, Eubacterium rectale
MFSAKLISDILPEFVIHNNNYSASEKEEKTQVIKLFSRFATSFKDYFKNRANCFSANDISSSSCHRIVNDNAEIFFSNALVYRRIVKNLSNDDINKISGDMKDSLKEMSLEEIYSYEKYGEFITQEGISFYNDICGKVNLFMNLYCQKNKENKNLYKLRKLHKQILCIADTSYEVPYKFESDEEVYQSVNGFLDNISSKHIVERLRKIGENYNGYNLDKIYIVSKFYESVSQKTYRDWETINTALEIHYNNILPGNGKSKADKVKKAVKNDLQKSITEINELVSNYKLCPDDNIKAETYIHEISHILNNFEAQELKYNPEIHLVESELKASELKNVLDVIMNAFHWCSVFMTEELVDKDNNFYAELEEIYDEIYPVISLYNLVRNYVTQKPYSTKKIKLNFGIPTLADGWSKSKEYSNNAIILMRDNLYYLGIFNAKNKPDKKIIEGNTSENKGDYKKMIYNLLPGPNKMIPKVFLSSKTGVETYKPSAYILEGYKQNKHLKSSKDFDITFCHDLIDYFKNCIAIHPEWKNFGFDFSDTSTYEDISGFYREVELQGYKIDWTYISEKDIDLLQEKGQLYLFQIYNKDFSKKSSGNDNLHTMYLKNLFSEENLKDIVLKLNGEAEIFFRKSSIKNPIIHKKGSILVNRTYEAEEKDQFGNIQIVRKTIPENIYQELYKYFNDKSDKELSDEAAKLKNVVGHHEAATNIVKDYRYTYDKYFLHMPITINFKANKTSFINDRILQYIAKEKDLHVIGIDRGERNLIYVSVIDTCGNIVEQKSFNIVNGYDYQIKLKQQEGARQIARKEWKEIGKIKEIKEGYLSLVIHEISKMVIKYNAIIAMEDLSYGFKKGRFKVERQVYQKFETMLINKLNYLVFKDISITENGGLLKGYQLTYIPDKLKNVGHQCGCIFYVPAAYTSKIDPTTGFVNIFKFKDLTVDAKREFIKKFDSIRYDSDKNLFCFTFDYNNFITQNTVMSKSSWSVYTYGVRIKRRFVNGRFSNESDTIDITKDMEKTLEMTDINWRDGHDLRQDIIDYEIVQHIFEIFKLTVQMRNSLSELEDRDYDRLISPVLNENNIFYDSAKAGDALPKDADANGAYCIALKGLYEIKQITENWKEDGKFSRDKLKISNKDWFDFIQNKRYL

SEQ ID NO: 69 - protein, 1259 aa, unidentified
  REGION 1..1259: note = Clostridium sp. AF34-10BH
MNYKTGLEDFIGKESLSKTLRNALIPTESTKIHMEEMGVIRDDELRAEKQQELKEIMDDYYRAFIEEKLGQIQGIQWNSLFQKMEETMEDISVRKDLDKIQNEKRKEICCYFTSDKRFKDLFNAKLITDILPNFIKDNKEYTEEEKAEKEQTRVLFQRFATAFTNYFNQRRNNFSEDNISTAISFRIVNENSEIHLQNMRAFQRIEQQYPEEVCGMEEEYKDMLQEWQMKHIYLVDFYDRVLTQPGIEYYNGICGKINEHMNQFCQKNRINKNDFRMKKLHKQILCKKSSYYEIPFRFESDQEVYDALNEFIKTMKEKEIICRCVHLGQKCDDYDLGKIYISSNKYEQISNALYGSWDTIRKCIKEEYMDALPGKGEKKEEKAEAAAKKEEYRSIADIDKIISLYGSEMDRTISAKKCITEICDMAGQISTDPLVCNSDIKLLQNKEKTTEIKTILDSFLHVYQWGQTFIVSDIIEKDSYFYSELEDVLEDFEGITTLYNHVRSYVTQKPYSTVKFKLHFGSPTLANGWSQSKEYDNNAILLMRDQKFYLGIFNVRNKPDKQIIKGHEKEEKGDYKKMIYNLLPGPSKMLPKVFITSRSGQETYKPSKHILDGYNEKRHIKSSPKFDLGYCWDLIDYYKECIHKHPDWKNYDFHFSDTKDYEDISGFYREVEMQGYQIKWTYISADEIQKLDEKGQIFLFQIYNKDFSVHSTGKDNLHTMYLKNLFSEENLKDIVLKLNGEAELFFRKASIKTPVVHKKGSVLVNRSYTQTVGDKEIRVSIPEEYYTEIYNYLNHIGRGKLSTEAQRYLEERKIKSFTATKDIVKNYRYCCDHYFLHLPITINFKAKSDIAVNERTLAYIAKKEDIHIIGIDRGERNLLYISVVDVHGNIREQRSFNIVNGYDYQQKLKDREKSRDAARKNWEEIEKIKELKEGYLSMVIHYIAQLVVKYNAVVAMEDLNYGFKTGRFKVERQVYQKFETMLIEKLHYLVFKDREVCEEGGVLRGYQLTYIPESLKKVGKQCGFIFYVPAGYTSKIDPTTGFVNLFSFKNLTNRESRQDFVGKFDEIRYDRDKKMFEFSFDYNNYIKKGTMLASTKWKVYTNGTRLKRIVVNGKYTSQSMEVELTDAMEKMLQRAGIEYHDGKDLKGQIVEKGIEAEIIDIFRLTVQMRNSRSESEDREYDRLISPVLNDKGEFFDTATADKTLPQDADANGAYCIALKGLYEVKQIKENWKENEQFPRNKLVQDNKTWFDFMQKKRYL

SEQ ID NO: 70 - protein, 1108 aa, unidentified; identical to SEQ ID NO: 63
  REGION 1..1108: note = Bacillushisashii

SEQ ID NO: 71 - protein, 1465 aa, Thermomonas hydrothermalis
MSEKTTQRAYTLRLNRASGECAVCQNNSCDCWHDALWATHKAVNRGAKAFGDWLLTLRGGLCHTLVEMEVPAKGNNPPQRPTDQERRDRRVLLALSWLSVEDEHGAPKEFIVATGRDSADDRAKKVEEKLREILEKRDFQEHEIDAWLQDCGPSLKAHIREDAVWVNRRALFDAAVERIKTLTWEEAWDFLEPFFGTQYFAGIGDGKDKDDAEGPARQGEKAKDLVQKAGQWLSARFGIGTGADFMSMAEAYEKIAKWASQAQNGDNGKATIEKLACALRPSEPPTLDTVLKCISGPGHKSATREYLKTLDKKSTVTQEDLNQLRKLADEDARNCRKKVGKKGKKPWADEVLKDVENSCELTYLQDNSPARHREFSVMLDHAARRVSMAHSWIKKAEQRRRQFESDAQKLKNLQERAPSAVEWLDRFCESRSMTTGANTGSGYRIRKRAIEGWSYVVQAWAEASCDTEDKRIAAARKVQADPEIEKFGDIQLFEALAADEAICVWRDQEGTQNPSILIDYVTGKTAEHNQKRFKVPAYRHPDELRHPVFCDFGNSRWSIQFAIHKEIRDRDKGAKQDTRQLQNRHGLKMRLWNGRSMTDVNLHWSSKRLTADLALDQNPNPNPTEVTRADRLGRAASSAFDHVKIKNVFNEKEWNGRLQAPRAELDRIAKLEEQGKTEQAEKLRKRLRWYVSFSPCLSPSGPFIVYAGQHNIQPKRSGQYAPHAQANKGRARLAQLILSRLPDLRILSVDLGHRFAAACAVWETLSSDAFRREIQGLNVLAGGSGEGDLFLHVEMTGDDGKRRTVVYRRIGPDQLLDNTPHPAPWARLDRQFLIKLQGEDEGVREASNEELWTVHKLEVEVGRTVPLIDRMVRSGFGKTEKQKERLKKLRELGWISAMPNEPSAETDEKEGEIRSISRSVDELMSSALGTLRLALKRHGNRARIAFAMTADYKPMPGGQKYYFHEAKEASKNDDETKRRDNQIEFLQDALSLWHDLFSSPDWEDNEAKKLWQNHIATLPNYQTPEEISAELKRVERNKKRKENRDKLRTAAKALAENDQLRQHLHDTWKERWESDDQQWKERLRSLKDWIFPRGKAEDNPSIRHVGGLSITRINTISGLYQILKAFKMRPEPDDLRKNIPQKGDDELENFNRRLLEARDRLREQRVKQLASRIIEAALGVGRIKIPKNGKLPKRPRTTVDTPCHAVVIESLKTYRPDDLRTRRENRQLMQWSSAKVRKYLKEGCELYGLHFLEVPANYTSRQCSRTGLPGIRCDDVPTGDFLKAPWWRRAINTAREKNGGDAKDRFLVDLYDHLNNLQSKGEALPATVRVPRQGGNLFIAGAQLDDTNKERRAIQADLNAAANIGLRALLDPDWRGRWWYVPCKDGTSEPALDRIEGSTAFNDVRSLPTGDNSSRRAPREIENLWRDPSGDSLESGTWSPTRAYWDTVQSRVIELLRRHAGLPTS

SEQ ID NO: 72 - protein, 1090 aa, Laceyella sacchari
MSIRSFKLKLKTKSGVNAEQLRRGLWRTHQLINDGIAYYMNWLVLLRQEDLFIRNKETNEIEKRSKEEIQAVLLERVHKQQQRNQWSGEVDEQTLLQALRQLYEEIVPSVIGKSGNASLKARFFLGPLVDPNNKTTKDVSKSGPTPKWKKMKDAGDPNWVQEYEKYMAERQTLVRLEEMGLIPLFPMYTDEVGDIHWLPQASGYTRTWDRDMFQQAIERLLSWESWNRRVRERRAQFEKKTHDFASRFSESDVQWMNKLREYEAQQEKSLEENAFAPNEPYALTKKALRGWERVYHSWMRLDSAASEEAYWQEVATCQTAMRGEFGDPAIYQFLAQKENHDIWRGYPERVIDFAELNHLQRELRRAKEDATFTLPDSVDHPLWVRYEAPGGTNIHGYDLVQDTKRNLTLILDKFILPDENGSWHEVKKVPFSLAKSKQFHRQVWLQEEQKQKKREVVFYDYSTNLPHLGTLAGAKLQWDRNFLNKRTQQQIEETGEIGKVFFNISVDVRPAVEVKNGRLQNGLGKALTVLTHPDGTKIVTGWKAEQLEKWVGESGRVSSLGLDSLSEGLRVMSIDLGQRTSATVSVFEITKEAPDNPYKFFYQLEGTEMFAVHQRSFLLALPGENPPQKIKQMREIRWKERNRIKQQVDQLSAILRLHKKVNEDERIQAIDKLLQKVASWQLNEEIATAWNQALSQLYSKAKENDLQWNQAIKNAHHQLEPVVGKQISLWRKDLSTGRQGIAGLSLWSIEELEATKKLLTRWSKRSREPGVVKRIERFETFAKQIQHHINQVKENRLKQLANLIVMTALGYKYDQEQKKWIEVYPACQVVLFENLRSYRFSFERSRRENKKLMEWSHRSIPKLVQMQGELFGLQVADVYAAYSSRYHGRTGAPGIRCHALTEADLRNETNIIHELIEAGFIKEEHRPYLQQGDLVPWSGGELFATLQKPYDNPRILTLHADINAAQNIQKRFWHPSMWFRVNCESVMEGEIVTYVPKNKTVHKKQGKTFRFVKVEGSDVYEWAKWSKNRNKNTFSSITERKPPSSMILFRDPSGTFFKEQEWVEQKTFWGKVQSMIQAYMKKTIVQRMEE

SEQ ID NO: 73 - protein, 1194 aa, unidentified
  source 1..1194: note = Dsulfonatronum thiodismutans
MVLGRKDDTAELRRALWTTHEHVNLAVAEVERVLLRCRGRSYWTLDRRGDPVHVPESQVAEDALAMAREAQRRNGWPVVGEDEEILLALRYLYEQIVPSCLLDDLGKPLKGDAQKIGTNYAGPLFDSDTCRRDEGKDVACCGPFHEVAGKYLGALPEWATPISKQEFDGKDASHLRFKATGGDDAFFRVSIEKANAWYEDPANQDALKNKAYNKDDWKKEKDKGISSWAVKYIQKQLQLGQDPRTEVRRKLWLELGLLPLFIPVFDKTMVGNLWNRLAVRLALAHLLSWESWNHRAVQDQALARAKRDELAALFLGMEDGFAGLREYELRRNESIKQHAFEPVDRPYVVSGRALRSWTRVREEWLRHGDTQESRKNICNRLQDRLRGKFGDPDVFHWLAEDGQEALWKERDCVTSFSLLNDADGLLEKRKGYALMTFADARLHPRWAMYEAPGGSNLRTYQIRKTENGLWADVVLLSPRNESAAVEEKTFNVRLAPSGQLSNVSFDQIQKGSKMVGRCRYQSANQQFEGLLGGAEILFDRKRIANEQHGATDLASKPGHVWFKLTLDVRPQAPQGWLDGKGRPALPPEAKHFKTALSNKSKFADQVRPGLRVLSVDLGVRSFAACSVFELVRGGPDQGTYFPAADGRTVDDPEKLWAKHERSFKITLPGENPSRKEEIARRAAMEELRSLNGDIRRLKAILRLSVLQEDDPRTEHLRLFMEAIVDDPAKSALNAELFKGFGDDRFRSTPDLWKQHCHFFHDKAEKVVAERFSRWRTETRPKSSSWQDWRERRGYAGGKSYWAVTYLEAVRGLILRWNMRGRTYGEVNRQDKKQFGTVASALLHHINQLKEDRIKTGADMIIQAARGFVPRKNGAGWVQVHEPCRLILFEDLARYRFRTDRSRRENSRLMRWSHREIVNEVGMQGELYGLHVDTTEAGFSSRYLASSGAPGVRCRHLVEEDFHDGLPGMHLVGELDWLLPKDKDRTANEARRLLGGMVRPGMLVPWDGGELFATLNAASQLHVIHADINAAQNLQRRFWGRCGEAIRIVCNQLSVDGSTRYEMAKAPKARLLGALQQLKNGDAPFHLTSIPNSQKPENSYVMTPTNAGKKYRAGPGEKSSGEEDELALDIVEQAEELAQGRKTFFRDPSGVFFAPDRWLPSEIYWSRIRRRIWQVTLERNSSGRQERAEMDEMPY

SEQ ID NO: 74 - protein, 1300 aa, unidentified
  source 1..1300: note = Francisella novicida
MSIYQEFVNKYSLSKTLRFELIPQGKTLENIKARGLILDDEKRAKDYKKAKQIIDKYHQFFIEEILSSVCISEDLLQNYSDVYFKLKKSDDDNLQKDFKSAKDTIKKQISEYIKDSEKFKNLFNQNLIDAKKGQESDLILWLKQSKDNGIELFKANSDITDIDEALEIIKSFKGWTTYFKGFHENRKNVYSSNDIPTSIIYRIVDDNLPKFLENKAKYESLKDKAPEAINYEQIKKDLAEELTFDIDYKTSEVNQRVFSLDEVFEIANFNNYLNQSGITKFNTIIGGKFVNGENTKRKGINEYINLYSQQINDKTLKKYKMSVLFKQILSDTESKSFVIDKLEDDSDVVTTMQSFYEQIAAFKTVEEKSIKETLSLLFDDLKAQKLDLSKIYFKNDKSLTDLSQQVFDDYSVIGTAVLEYITQQIAPKNLDNPSKKEQELIAKKTEKAKYLSLETIKLALEEFNKHRDIDKQCRFEEILANFAAIPMIFDEIAQNKDNLAQISIKYQNQGKKDLLQASAEDDVKAIKDLLDQTNNLLHKLKIFHISQSEDKANILDKDEHFYLVFEECYFELANIVPLYNKIRNYITQKPYSDEKFKLNFENSTLANGWDKNKEPDNTAILFIKDDKYYLGVMNKKNNKIFDDKAIKENKGEGYKKIVYKLLPGANKMLPKVFFSAKSIKFYNPSEDILRIRNHSTHTKNGSPQKGYEKFEFNIEDCRKFIDFYKQSISKHPEWKDFGFRFSDTQRYNSIDEFYREVENQGYKLTFENISESYIDSVVNQGKLYLFQIYNKDFSAYSKGRPNLHTLYWKALFDERNLQDVVYKLNGEAELFYRKQSIPKKITHPAKEAIANKNKDNPKKESVFEYDLIKDKRFTEDKFFFHCPITINFKSSGANKFNDEINLLLKEKANDVHILSIDRGERHLAYYTLVDGKGNIIKQDTFNIIGNDRMKTNYHDKLAAIEKDRDSARKDWKKINNIKEMKEGYLSQVVHEIAKLVIEYNAIVVFEDLNFGFKRGRFKVEKQVYQKLEKMLIEKLNYLVFKDNEFDKTGGVLRAYQLTAPFETFKKMGKQTGIIYYVPAGFTSKICPVTGFVNQLYPKYESVSKSQEFFSKFDKICYNLDKGYFEFSFDYKNFGDKAAKGKWTIASFGSRLINFRNSDKNHNWDTREVYPTKELEKLLKDYSIEYGHGECIKAAICGESDKKFFAKLTSVLNTILQMRNSKTGTELDYLISPVADVNGNFFDSRQAPKNMPQDADANGAYHIGLKGLMLLGRIKNNQEGKKLNLVIKNEEYFEFVQNRNN

SEQ ID NO: 75 - protein, 1082 aa, Geobacillus thermodenitrificans; identical to SEQ ID NO: 38

SEQ ID NO: 76 - protein, 887 aa, Natronobacterium gregoryi
MTVIDLDSTTTADELTSGHTYDISVTLTGVYDNTDEQHPRMSLAFEQDNGERRYITLWKNTTPKDVFTYDYATGSTYIFTNIDYEVKDGYENLTATYQTTVENATAQEVGTTDEDETFAGGEPLDHHLDDALNETPDDAETESDSGHVMTSFASRDQLPEWTLHTYTLTATDGAKTDTEYARRTLAYTVRQELYTDHDAAPVATDGLMLLTPEPLGETPLDLDCGVRVEADETRTLDYTTAKDRLLARELVEEGLKRSLWDDYLVRGIDEVLSKEPVLTCDEFDLHERYDLSVEVGHSGRAYLHINFRHRFVPKLTLADIDDDNIYPGLRVKTTYRPRRGHIVWGLRDECATDSLNTLGNQSVVAYHRNNQTPINTDLLDAIEAADRRVVETRRQGHGDDAVSFPQELLAVEPNTHQIKQFASDGFHQQARSKTRLSASRCSEKAQAFAERLDPVRLNGSTVEFSSEFFTGNNEQQLRLLYENGESVLTFRDGARGAHPDETFSKGIVNPPESFEVAVVLPEQQADTCKAQWDTMADLLNQAGAPPTRSETVQYDAFSSPESISLNVAGAIDPSEVDAAFVVLPPDQEGFADLASPTETYDELKKALANMGIYSQMAYFDRFRDAKIFYTRNVALGLLAAAGGVAFTTEHAMPGDADMFIGIDVSRSYPEDGASGQINIAATATAVYKDGTILGHSSTRPQLGEKLQSTDVRDIMKNAILGYQQVTGESPTHIVIHRDGFMNEDLDPATEFLNEQGVEYDIVEIRKQPQTRLLAVSDVQYDTPVKSIAAINQNEPRATVATFGAPEYLATRDGGGLPRPIQIERVAGETDIETLTRQVYLLSQSHIQVHNSTARLPITTAYADQASTHATKGYLVQTGAFESNVGFL

SEQ ID NO: 77 - protein, 1387 aa, synthetic construct
  REGION 1..1387: note = Synthetic
DYKVYDVRKMIAKSEQEIGKATAKYFFYSNIMNFFKTEITLANGEIRKRPLIETNGETGEIVWDKGRDFATVRKVLSMPQVNIVKKTEVQTGGFSKESILPKRNSDKLIARKKDWDPKKYGGFDSPTVAYSVLVVAKVEKGKSKKLKSVKELLGITIMERSSFEKNPIDFLEAKGYKEVKKDLIIKLPKYSLFELENGRKRMLASAGELQKGNELALPSKYVNFLYLASHYEKLKGSPEDNEQKQLFVEQHKHYLDEIIEQISEFSKRVILADANLDKVLSAYNKHRDKPIREQAENIIHLFTLTNLGAPAAFKYFDTTIDRKRYTSTKEVLDATLIHQSITGLYETRIDLSQLGGDGGSGGSGGSGGSGGSGGSGGDKKYSIGLAIGTNSVGWAVITDEYKVPSKKFKVLGNTDRHSIKKNLIGALLFDSGETAEATRLKRTARRRYTRRKNRICYLQEIFSNEMAKVDDSFFHRLEESFLVEEDKKHERHPIFGNIVDEVAYHEKYPTIYHLRKKLVDSTDKADLRLIYLALAHMIKFRGHFLIEGDLNPDNSDVDKLFIQLVQTYNQLFEENPINASGVDAKAILSARLSKSRRLENLIAQLPGEKKNGLFGNLIALSLGLTPNFKSNFDLAEDAKLQLSKDTYDDDLDNLLAQIGDQYADLFLAAKNLSDAILLSDILRVNTEITKAPLSASMIKRYDEHHQDLTLLKALVRQQLPEKYKEIFFDQSKNGYAGYIDGGASQEEFYKFIKPILEKMDGTEELLVKLNREDLLRKQRTFDNGSIPHQIHLGELHAILRRQEDFYPFLKDNREKIEKILTFRIPYYVGPLARGNSRFAWMTRKSEETITPWNFEEVVDKGASAQSFIERMTNFDKNLPNEKVLPKHSLLYEYFTVYNELTKVKYVTEGMRKPAFLSGEQKKAIVDLLFKTNRKVTVKQLKEDYFKKIECFDSVEISGVEDRFNASLGTYHDLLKIIKDKDFLDNEENEDILEDIVLTLTLFEDREMIEERLKTYAHLFDDKVMKQLKRRRYTGWGRLSRKLINGIRDKQSGKTILDFLKSDGFANRNFMQLIHDDSLTFKEDIQKAQVSGQGDSLHEHIANLAGSPAIKKGILQTVKVVDELVKVMGRHKPENIVIEMARENQTTQKGQKNSRERMKRIEEGIKELGSQILKEHPVENTQLQNEKLYLYYLQNGRDMYVDQELDINRLSDYDVDHIVPQSFLKDDSIDNKVLTRSDKNRGKSDNVPSEEVVKKMKNYWRQLLNAKLITQRKFDNLTKAERGGLSELDKAGFIKRQLVETRQITKHVAQILDSRMNTKYDENDKLIREVKVITLKSKLVSDFRKDFQFYKVREINNYHHAHDAYLNAVVGTALIKKYPKLESEFVYG

SEQ ID NO: 78 - protein, 1388 aa, synthetic construct
  REGION 1..1388: note = Synthetic
EIGKATAKYFFYSNIMNFFKTEITLANGEIRKRPLIETNGETGEIVWDKGRDFATVRKVLSMPQVNIVKKTEVQTGGFSKESILPKRNSDKLIARKKDWDPKKYGGFDSPTVAYSVLVVAKVEKGKSKKLKSVKELLGITIMERSSFEKNPIDFLEAKGYKEVKKDLIIKLPKYSLFELENGRKRMLASAGELQKGNELALPSKYVNFLYLASHYEKLKGSPEDNEQKQLFVEQHKHYLDEIIEQISEFSKRVILADANLDKVLSAYNKHRDKPIREQAENIIHLFTLTNLGAPAAFKYFDTTIDRKRYTSTKEVLDATLIHQSITGLYETRIDLSQLGGDGGSGGSGGSGGSGGSGGSGGMDKKYSIGLAIGTNSVGWAVITDEYKVPSKKFKVLGNTDRHSIKKNLIGALLFDSGETAEATRLKRTARRRYTRRKNRICYLQEIFSNEMAKVDDSFFHRLEESFLVEEDKKHERHPIFGNIVDEVAYHEKYPTIYHLRKKLVDSTDKADLRLIYLALAHMIKFRGHFLIEGDLNPDNSDVDKLFIQLVQTYNQLFEENPINASGVDAKAILSARLSKSRRLENLIAQLPGEKKNGLFGNLIALSLGLTPNFKSNFDLAEDAKLQLSKDTYDDDLDNLLAQIGDQYADLFLAAKNLSDAILLSDILRVNTEITKAPLSASMIKRYDEHHQDLTLLKALVRQQLPEKYKEIFFDQSKNGYAGYIDGGASQEEFYKFIKPILEKMDGTEELLVKLNREDLLRKQRTFDNGSIPHQIHLGELHAILRRQEDFYPFLKDNREKIEKILTFRIPYYVGPLARGNSRFAWMTRKSEETITPWNFEEVVDKGASAQSFIERMTNFDKNLPNEKVLPKHSLLYEYFTVYNELTKVKYVTEGMRKPAFLSGEQKKAIVDLLFKTNRKVTVKQLKEDYFKKIECFDSVEISGVEDRFNASLGTYHDLLKIIKDKDFLDNEENEDILEDIVLTLTLFEDREMIEERLKTYAHLFDDKVMKQLKRRRYTGWGRLSRKLINGIRDKQSGKTILDFLKSDGFANRNFMQLIHDDSLTFKEDIQKAQVSGQGDSLHEHIANLAGSPAIKKGILQTVKVVDELVKVMGRHKPENIVIEMARENQTTQKGQKNSRERMKRIEEGIKELGSQILKEHPVENTQLQNEKLYLYYLQNGRDMYVDQELDINRLSDYDVDHIVPQSFLKDDSIDNKVLTRSDKNRGKSDNVPSEEVVKKMKNYWRQLLNAKLITQRKFDNLTKAERGGLSELDKAGFIKRQLVETRQITKHVAQILDSRMNTKYDENDKLIREVKVITLKSKLVSDFRKDFQFYKVREINNYHHAHDAYLNAVVGTALIKKYPKLESEFVYGDYKVYDVRKMIAKSEQ

SEQ ID NO: 79 - protein, 1387 aa, synthetic construct
  REGION 1..1387: note = Synthetic
NIMNFFKTEITLANGEIRKRPLIETNGETGEIVWDKGRDFATVRKVLSMPQVNIVKKTEVQTGGFSKESILPKRNSDKLIARKKDWDPKKYGGFDSPTVAYSVLVVAKVEKGKSKKLKSVKELLGITIMERSSFEKNPIDFLEAKGYKEVKKDLIIKLPKYSLFELENGRKRMLASAGELQKGNELALPSKYVNFLYLASHYEKLKGSPEDNEQKQLFVEQHKHYLDEIIEQISEFSKRVILADANLDKVLSAYNKHRDKPIREQAENIIHLFTLTNLGAPAAFKYFDTTIDRKRYTSTKEVLDATLIHQSITGLYETRIDLSQLGGDGGSGGSGGSGGSGGSGGSGGDKKYSIGLAIGTNSVGWAVITDEYKVPSKKFKVLGNTDRHSIKKNLIGALLFDSGETAEATRLKRTARRRYTRRKNRICYLQEIFSNEMAKVDDSFFHRLEESFLVEEDKKHERHPIFGNIVDEVAYHEKYPTIYHLRKKLVDSTDKADLRLIYLALAHMIKFRGHFLIEGDLNPDNSDVDKLFIQLVQTYNQLFEENPINASGVDAKAILSARLSKSRRLENLIAQLPGEKKNGLFGNLIALSLGLTPNFKSNFDLAEDAKLQLSKDTYDDDLDNLLAQIGDQYADLFLAAKNLSDAILLSDILRVNTEITKAPLSASMIKRYDEHHQDLTLLKALVRQQLPEKYKEIFFDQSKNGYAGYIDGGASQEEFYKFIKPILEKMDGTEELLVKLNREDLLRKQRTFDNGSIPHQIHLGELHAILRRQEDFYPFLKDNREKIEKILTFRIPYYVGPLARGNSRFAWMTRKSEETITPWNFEEVVDKGASAQSFIERMTNFDKNLPNEKVLPKHSLLYEYFTVYNELTKVKYVTEGMRKPAFLSGEQKKAIVDLLFKTNRKVTVKQLKEDYFKKIECFDSVEISGVEDRFNASLGTYHDLLKIIKDKDFLDNEENEDILEDIVLTLTLFEDREMIEERLKTYAHLFDDKVMKQLKRRRYTGWGRLSRKLINGIRDKQSGKTILDFLKSDGFANRNFMQLIHDDSLTFKEDIQKAQVSGQGDSLHEHIANLAGSPAIKKGILQTVKVVDELVKVMGRHKPENIVIEMARENQTTQKGQKNSRERMKRIEEGIKELGSQILKEHPVENTQLQNEKLYLYYLQNGRDMYVDQELDINRLSDYDVDHIVPQSFLKDDSIDNKVLTRSDKNRGKSDNVPSEEVVKKMKNYWRQLLNAKLITQRKFDNLTKAERGGLSELDKAGFIKRQLVETRQITKHVAQILDSRMNTKYDENDKLIREVKVITLKSKLVSDFRKDFQFYKVREINNYHHAHDAYLNAVVGTALIKKYPKLESEFVYGDYKVYDVRKMIAKSEQEIGKATAKYFFYS

SEQ ID NO: 80 - protein, 1388 aa, synthetic construct
  REGION 1..1388: note = Synthetic
PEDNEQKQLFVEQHKHYLDEIIEQISEFSKRVILADANLDKVLSAYNKHRDKPIREQAENIIHLFTLTNLGAPAAFKYFDTTIDRKRYTSTKEVLDATLIHQSITGLYETRIDLSQLGGDGGSGGSGGSGGSGGSGGSGGMDKKYSIGLAIGTNSVGWAVITDEYKVPSKKFKVLGNTDRHSIKKNLIGALLFDSGETAEATRLKRTARRRYTRRKNRICYLQEIFSNEMAKVDDSFFHRLEESFLVEEDKKHERHPIFGNIVDEVAYHEKYPTIYHLRKKLVDSTDKADLRLIYLALAHMIKFRGHFLIEGDLNPDNSDVDKLFIQLVQTYNQLFEENPINASGVDAKAILSARLSKSRRLENLIAQLPGEKKNGLFGNLIALSLGLTPNFKSNFDLAEDAKLQLSKDTYDDDLDNLLAQIGDQYADLFLAAKNLSDAILLSDILRVNTEITKAPLSASMIKRYDEHHQDLTLLKALVRQQLPEKYKEIFFDQSKNGYAGYIDGGASQEEFYKFIKPILEKMDGTEELLVKLNREDLLRKQRTFDNGSIPHQIHLGELHAILRRQEDFYPFLKDNREKIEKILTFRIPYYVGPLARGNSRFAWMTRKSEETITPWNFEEVVDKGASAQSFIERMTNFDKNLPNEKVLPKHSLLYEYFTVYNELTKVKYVTEGMRKPAFLSGEQKKAIVDLLFKTNRKVTVKQLKEDYFKKIECFDSVEISGVEDRFNASLGTYHDLLKIIKDKDFLDNEENEDILEDIVLTLTLFEDREMIEERLKTYAHLFDDKVMKQLKRRRYTGWGRLSRKLINGIRDKQSGKTILDFLKSDGFANRNFMQLIHDDSLTFKEDIQKAQVSGQGDSLHEHIANLAGSPAIKKGILQTVKVVDELVKVMGRHKPENIVIEMARENQTTQKGQKNSRERMKRIEEGIKELGSQILKEHPVENTQLQNEKLYLYYLQNGRDMYVDQELDINRLSDYDVDHIVPQSFLKDDSIDNKVLTRSDKNRGKSDNVPSEEVVKKMKNYWRQLLNAKLITQRKFDNLTKAERGGLSELDKAGFIKRQLVETRQITKHVAQILDSRMNTKYDENDKLIREVKVITLKSKLVSDFRKDFQFYKVREINNYHHAHDAYLNAVVGTALIKKYPKLESEFVYGDYKVYDVRKMIAKSEQEIGKATAKYFFYSNIMNFFKTEITLANGEIRKRPLIETNGETGEIVWDKGRDFATVRKVLSMPQVNIVKKTEVQTGGFSKESILPKRNSDKLIARKKDWDPKKYGGFDSPTVAYSVLVVAKVEKGKSKKLKSVKELLGITIMERSSFEKNPIDFLEAKGYKEVKKDLIIKLPKYSLFELENGRKRMLASAGELQKGNELALPSKYVNFLYLASHYEKLKGS

SEQ ID NO: 81 - protein, 1387 aa, synthetic construct
  REGION 1..1387: note = Synthetic
KPIREQAENIIHLFTLTNLGAPAAFKYFDTTIDRKRYTSTKEVLDATLIHQSITGLYETRIDLSQLGGDGGSGGSGGSGGSGGSGGSGGDKKYSIGLAIGTNSVGWAVITDEYKVPSKKFKVLGNTDRHSIKKNLIGALLFDSGETAEATRLKRTARRRYTRRKNRICYLQEIFSNEMAKVDDSFFHRLEESFLVEEDKKHERHPIFGNIVDEVAYHEKYPTIYHLRKKLVDSTDKADLRLIYLALAHMIKFRGHFLIEGDLNPDNSDVDKLFIQLVQTYNQLFEENPINASGVDAKAILSARLSKSRRLENLIAQLPGEKKNGLFGNLIALSLGLTPNFKSNFDLAEDAKLQLSKDTYDDDLDNLLAQIGDQYADLFLAAKNLSDAILLSDILRVNTEITKAPLSASMIKRYDEHHQDLTLLKALVRQQLPEKYKEIFFDQSKNGYAGYIDGGASQEEFYKFIKPILEKMDGTEELLVKLNREDLLRKQRTFDNGSIPHQIHLGELHAILRRQEDFYPFLKDNREKIEKILTFRIPYYVGPLARGNSRFAWMTRKSEETITPWNFEEVVDKGASAQSFIERMTNFDKNLPNEKVLPKHSLLYEYFTVYNELTKVKYVTEGMRKPAFLSGEQKKAIVDLLFKTNRKVTVKQLKEDYFKKIECFDSVEISGVEDRFNASLGTYHDLLKIIKDKDFLDNEENEDILEDIVLTLTLFEDREMIEERLKTYAHLFDDKVMKQLKRRRYTGWGRLSRKLINGIRDKQSGKTILDFLKSDGFANRNFMQLIHDDSLTFKEDIQKAQVSGQGDSLHEHIANLAGSPAIKKGILQTVKVVDELVKVMGRHKPENIVIEMARENQTTQKGQKNSRERMKRIEEGIKELGSQILKEHPVENTQLQNEKLYLYYLQNGRDMYVDQELDINRLSDYDVDHIVPQSFLKDDSIDNKVLTRSDKNRGKSDNVPSEEVVKKMKNYWRQLLNAKLITQRKFDNLTKAERGGLSELDKAGFIKRQLVETRQITKHVAQILDSRMNTKYDENDKLIREVKVITLKSKLVSDFRKDFQFYKVREINNYHHAHDAYLNAVVGTALIKKYPKLESEFVYGDYKVYDVRKMIAKSEQEIGKATAKYFFYSNIMNFFKTEITLANGEIRKRPLIETNGETGEIVWDKGRDFATVRKVLSMPQVNIVKKTEVQTGGFSKESILPKRNSDKLIARKKDWDPKKYGGFDSPTVAYSVLVVAKVEKGKSKKLKSVKELLGITIMERSSFEKNPIDFLEAKGYKEVKKDLIIKLPKYSLFELENGRKRMLASAGELQKGNELALPSKYVNFLYLASHYEKLKGSPEDNEQKQLFVEQHKHYLDEIIEQISEFSKRVILADANLDKVLSAYNKHRD

SEQ ID NO: 82 - protein, 357 aa, synthetic construct
  REGION 1..357: note = Synthetic
DYKVYDVRKMIAKSEQEIGKATAKYFFYSNIMNFFKTEITLANGEIRKRPLIETNGETGEIVWDKGRDFATVRKVLSMPQVNIVKKTEVQTGGFSKESILPKRNSDKLIARKKDWDPKKYGGFDSPTVAYSVLVVAKVEKGKSKKLKSVKELLGITIMERSSFEKNPIDFLEAKGYKEVKKDLIIKLPKYSLFELENGRKRMLASAGELQKGNELALPSKYVNFLYLASHYEKLKGSPEDNEQKQLFVEQHKHYLDEIIEQISEFSKRVILADANLDKVLSAYNKHRDKPIREQAENIIHLFTLTNLGAPAAFKYFDTTIDRKRYTSTKEVLDATLIHQSITGLYETRIDLSQLGGD

SEQ ID NO: 83 - protein, 341 aa, synthetic construct
  REGION 1..341: note = Synthetic
EIGKATAKYFFYSNIMNFFKTEITLANGEIRKRPLIETNGETGEIVWDKGRDFATVRKVLSMPQVNIVKKTEVQTGGFSKESILPKRNSDKLIARKKDWDPKKYGGFDSPTVAYSVLVVAKVEKGKSKKLKSVKELLGITIMERSSFEKNPIDFLEAKGYKEVKKDLIIKLPKYSLFELENGRKRMLASAGELQKGNELALPSKYVNFLYLASHYEKLKGSPEDNEQKQLFVEQHKHYLDEIIEQISEFSKRVILADANLDKVLSAYNKHRDKPIREQAENIIHLFTLTNLGAPAAFKYFDTTIDRKRYTSTKEVLDATLIHQSITGLYETRIDLSQLGGD

SEQ ID NO: 84 - protein, 328 aa, synthetic construct
  REGION 1..328: note = Synthetic
NIMNFFKTEITLANGEIRKRPLIETNGETGEIVWDKGRDFATVRKVLSMPQVNIVKKTEVQTGGFSKESILPKRNSDKLIARKKDWDPKKYGGFDSPTVAYSVLVVAKVEKGKSKKLKSVKELLGITIMERSSFEKNPIDFLEAKGYKEVKKDLIIKLPKYSLFELENGRKRMLASAGELQKGNELALPSKYVNFLYLASHYEKLKGSPEDNEQKQLFVEQHKHYLDEIIEQISEFSKRVILADANLDKVLSAYNKHRDKPIREQAENIIHLFTLTNLGAPAAFKYFDTTIDRKRYTSTKEVLDATLIHQSITGLYETRIDLSQLGGD

SEQ ID NO: 85 - protein, 120 aa, synthetic construct
  REGION 1..120: note = Synthetic
PEDNEQKQLFVEQHKHYLDEIIEQISEFSKRVILADANLDKVLSAYNKHRDKPIREQAENIIHLFTLTNLGAPAAFKYFDTTIDRKRYTSTKEVLDATLIHQSITGLYETRIDLSQLGGD

SEQ ID NO: 86 - protein, 69 aa, synthetic construct
  REGION 1..69: note = Synthetic
KPIREQAENIIHLFTLTNLGAPAAFKYFDTTIDRKRYTSTKEVLDATLIHQSITGLYETRIDLSQLGGD

SEQ ID NO: 87 - protein, 1367 aa, synthetic construct
  REGION 1..1367: note = Synthetic
DKKYSIGLDIGTNSVGWAVITDEYKVPSKKFKVLGNTDRHSIKKNLIGALLFDSGETAEATRLKRTARRRYTRRKNRICYLQEIFSNEMAKVDDSFFHRLEESFLVEEDKKHERHPIFGNIVDEVAYHEKYPTIYHLRKKLVDSTDKADLRLIYLALAHMIKFRGHFLIEGDLNPDNSDVDKLFIQLVQTYNQLFEENPINASGVDAKAILSARLSKSRRLENLIAQLPGEKKNGLFGNLIALSLGLTPNFKSNFDLAEDAKLQLSKDTYDDDLDNLLAQIGDQYADLFLAAKNLSDAILLSDILRVNTEITKAPLSASMIKRYDEHHQDLTLLKALVRQQLPEKYKEIFFDQSKNGYAGYIDGGASQEEFYKFIKPILEKMDGTEELLVKLNREDLLRKQRTFDNGSIPHQIHLGELHAILRRQEDFYPFLKDNREKIEKILTFRIPYYVGPLARGNSRFAWMTRKSEETITPWNFEEVVDKGASAQSFIERMTNFDKNLPNEKVLPKHSLLYEYFTVYNELTKVKYVTEGMRKPAFLSGEQKKAIVDLLFKTNRKVTVKQLKEDYFKKIECFDSVEISGVEDRFNASLGTYHDLLKIIKDKDFLDNEENEDILEDIVLTLTLFEDREMIEERLKTYAHLFDDKVMKQLKRRRYTGWGRLSRKLINGIRDKQSGKTILDFLKSDGFANRNFMQLIHDDSLTFKEDIQKAQVSGQGDSLHEHIANLAGSPAIKKGILQTVKVVDELVKVMGRHKPENIVIEMARENQTTQKGQKNSRERMKRIEEGIKELGSQILKEHPVENTQLQNEKLYLYYLQNGRDMYVDQELDINRLSDYDVDAIVPQSFLKDDSIDNKVLTRSDKNRGKSDNVPSEEVVKKMKNYWRQLLNAKLITQRKFDNLTKAERGGLSELDKAGFIKRQLVETRQITKHVAQILDSRMNTKYDENDKLIREVKVITLKSKLVSDFRKDFQFYKVREINNYHHAHDAYLNAVVGTALIKKYPKLESEFVYGDYKVYDVRKMIAKSEQEIGKATAKYFFYSNIMNFFKTEITLANGEIRKRPLIETNGETGEIVWDKGRDFATVRKVLSMPQVNIVKKTEVQTGGFSKESILPKRNSDKLIARKKDWDPKKYGGFVSPTVAYSVLVVAKVEKGKSKKLKSVKELLGITIMERSSFEKNPIDFLEAKGYKEVKKDLIIKLPKYSLFELENGRKRMLASARELQKGNELALPSKYVNFLYLASHYEKLKGSPEDNEQKQLFVEQHKHYLDEIIEQISEFSKRVILADANLDKVLSAYNKHRDKPIREQAENIIHLFTLTNLGAPAAFKYFDTTIDRKQYRSTKEVLDATLIHQSITGLYETRIDLSQLGGD

SEQ ID NO: 88 - protein, 1367 aa, synthetic construct
  REGION 1..1367: note = Synthetic
DKKYSIGLDIGTNSVGWAVITDEYKVPSKKFKVLGNTDRHSIKKNLIGALLFDSGETAEATRLKRTARRRYTRRKNRICYLQEIFSNEMAKVDDSFFHRLEESFLVEEDKKHERHPIFGNIVDEVAYHEKYPTIYHLRKKLVDSTDKADLRLIYLALAHMIKFRGHFLIEGDLNPDNSDVDKLFIQLVQTYNQLFEENPINASGVDAKAILSARLSKSRRLENLIAQLPGEKKNGLFGNLIALSLGLTPNFKSNFDLAEDAKLQLSKDTYDDDLDNLLAQIGDQYADLFLAAKNLSDAILLSDILRVNTEITKAPLSASMIKRYDEHHQDLTLLKALVRQQLPEKYKEIFFDQSKNGYAGYIDGGASQEEFYKFIKPILEKMDGTEELLVKLNREDLLRKQRTFDNGSIPHQIHLGELHAILRRQEDFYPFLKDNREKIEKILTFRIPYYVGPLARGNSRFAWMTRKSEETITPWNFEEVVDKGASAQSFIERMTNFDKNLPNEKVLPKHSLLYEYFTVYNELTKVKYVTEGMRKPAFLSGEQKKAIVDLLFKTNRKVTVKQLKEDYFKKIECFDSVEISGVEDRFNASLGTYHDLLKIIKDKDFLDNEENEDILEDIVLTLTLFEDREMIEERLKTYAHLFDDKVMKQLKRRRYTGWGRLSRKLINGIRDKQSGKTILDFLKSDGFANRNFMQLIHDDSLTFKEDIQKAQVSGQGDSLHEHIANLAGSPAIKKGILQTVKVVDELVKVMGRHKPENIVIEMARENQTTQKGQKNSRERMKRIEEGIKELGSQILKEHPVENTQLQNEKLYLYYLQNGRDMYVDQELDINRLSDYDVDAIVPQSFLKDDSIDNKVLTRSDKNRGKSDNVPSEEVVKKMKNYWRQLLNAKLITQRKFDNLTKAERGGLSELDKAGFIKRQLVETRQITKHVAQILDSRMNTKYDENDKLIREVKVITLKSKLVSDFRKDFQFYKVREINNYHHAHDAYLNAVVGTALIKKYPKLESEFVYGDYKVYDVRKMIAKSEQEIGKATAKYFFYSNIMNFFKTEITLANGEIRKRPLIETNGETGEIVWDKGRDFATVRKVLSMPQVNIVKKTEVQTGGFSKESILPKRNSDKLIARKKDWDPKKYGGFVSPTVAYSVLVVAKVEKGKSKKLKSVKELLGITIMERSSFEKNPIDFLEAKGYKEVKKDLIIKLPKYSLFELENGRKRMLASARELQKGNELALPSKYVNFLYLASHYEKLKGSPEDNEQKQLFVEQHKHYLDEIIEQISEFSKRVILADANLDKVLSAYNKHRDKPIREQAENIIHLFTLTNLGAPAAFKYFDTTIDRKEYRSTKEVLDATLIHQSITGLYETRIDLSQLGGD

SEQ ID NO: 89 - protein, 677 aa, unidentified
  REGION 1..677: note = moloney murine leukemia virus
TLNIEDEYRLHETSKEPDVSLGSTWLSDFPQAWAETGGMGLAVRQAPLIIPLKATSTPVSIKQYPMSQEARLGIKPHIQRLLDQGILVPCQSPWNTPLLPVKKPGTNDYRPVQDLREVNKRVEDIHPTVPNPYNLLSGLPPSHQWYTVLDLKDAFFCLRLHPTSQPLFAFEWRDPEMGISGQLTWTRLPQGFKNSPTLFDEALHRDLADFRIQHPDLILLQYVDDLLLAATSELDCQQGTRALLQTLGNLGYRASAKKAQICQKQVKYLGYLLKEGQRWLTEARKETVMGQPTPKTPRQLREFLGTAGFCRLWIPGFAEMAAPLYPLTKTGTLFNWGPDQQKAYQEIKQALLTAPALGLPDLTKPFELFVDEKQGYAKGVLTQKLGPWRRPVAYLSKKLDPVAAGWPPCLRMVAAIAVLTKDAGKLTMGQPLVILAPHAVEALVKQPPDRWLSNARMTHYQALLLDTDRVQFGPVVALNPATLLPLPEEGLQHNCLDILAEAHGTRPDLTDQPLPDADHTWYTDGSSLLQEGQRKAGAAVTTETEVIWAKALPAGTSAQRAELIALTQALKMAEGKKLNVYTDSRYAFATAHIHGEIYRRRGLLTSEGKEIKNKDEILALLKALFLPKRLSIIHCPGHQKGHSAEARGNRMADQAARKAAITETPDTSTLLIENSSP

SEQ ID NO: 90 - protein, 560 aa, unidentified
  REGION 1..560: note = moloney murine leukemia virus
  SITE 229: note = misc_feature - Xaa can be any naturally occurring amino acid
AFPLERPDWDYTTQAGRNHLVHYRQLLLAGLQNAGRSPTNLAKVKGITQGPNESPSAFLERLKEAYRRYTPYDPEDPGQETNVSMSFIWQSAPDIGRKLGRLEDLKSKTLGDLVREAEKIFNKRETPEEREERIRRETEEKEERRRTVDEQKEKERDRRRHREMSKLLATVVIGQEQDRQEGERKRPQLDKDQCAYCKEKGHWAKDCPKKPRGPRGPRPQTSLLTLGDXGGQGQDPPPEPRITLKVGGQPVTFLVDTGAQHSVLTQNPGPLSDKSAWVQGATGGKRYRWTTDRKVHLATGKVTHSFLHVPDCPYPLLGRDLLTKLKAQIHFEGSGAQVVGPMGQPLQVLTLNIEDEYRLHETSKEPDVSLGFTWLSDFPQAWAESGGMGLAVRQAPLIIPLKATSTPVSIKQYPMSQEARLGIKPHIQRLLDQGILVPCQSPWNTPLLPVKKPGTNDYRPVQDLREVNKRVEDIHPTVPNPYNLLSGLPPSHQWYTVLDLKDAFFCLRLHPTSQPLFAFEWRDPEMGISGQLTWTRLPQGFKNSPTLFDEALHRDLADFR

SEQ ID NO: 91 - protein, 669 aa, unidentified
  REGION 1..669: note = Feline leukemia virus
TLQLEEEYRLFEPESTQKQEMDIWLKNFPQAWAETGGMGTAHCQAPVLIQLKATATPISIRQYPMPHEAYQGIKPHIRRMLDQGILKPCQSPWNTPLLPVKKPGTEDYRPVQDLREVNKRVEDIHPTVPNPYNLLSTLPPSHPWYTVLDLKDAFFCLRLHSESQLLFAFEWRDPEIGLSGQLTWTRLPQGFKNSPTLFDEALHSDLADFRVRYPALVLLQYVDDLLLAAATRTECLEGTKALLETLGNKGYRASAKKAQICLQEVTYLGYSLKDGQRWLTKARKEAILSIPVPKNSRQVREFLGTAGYCRLWIPGFAELAAPLYPLTRPGTLFQWGTEQQLAFEDIKKALLSSPALGLPDITKPFELFIDENSGFAKGVLVQKLGPWKRPVAYLSKKLDTVASGWPPCLRMVAAIAILVKDAGKLTLGQPLTILTSHPVEALVRQPPNKWLSNARMTHYQAMLLDAERVHFGPTVSLNPATLLPLPSGGNHHDCLQILAETHGTRPDLTDQPLPDADLTWYTDGSSFIRNGEREAGAAVTTESEVIWAAPLPPGTSAQRAELIALTQALKMAEGKKLTVYTDSRYAFATTHVHGEIYRRRGLLTSEGKEIKNKNEILALLEALFLPKRLSIIHCPGHQKGDSPQAKGNRLADDTAKKAATETHSSLTVL

SEQ ID NO: 92 - protein, 559 aa, unidentified
  REGION 1..559: note = HIV-1
  SITE 280: note = misc_feature - Xaa can be any naturally occurring amino acid
PISPIETVPVKLKPGMDGPKVKQWPLTEEKIKALVEICTEMEKEGKISKIGPENPYNTPVFAIKKKDSTKWRKLVDFRELNKRTQDFWEVQLGIPHPAGLKKKKSVTVLDVGDAYFSVPLDEDFRKYTAFTIPSINNETPGIRYQYNVLPQGWKGSPAIFQSSMTKILEPFRKQNPDIVIYQYMDDLYVGSDLEIGQHRTKIEELRQHLLRWGLTTPDKKHQKEPPFLWMGYELHPDKWTVQPIVLPEKDSWTVNDIQKLVGKLNWASQIYPGIKVRQLXKLLRGTKALTEVIPLTEEAELELAENREILKEPVHGVYYDPSKDLIAEIQKQGQGQWTYQIYQEPFKNLKTGKYARMRGAHTNDVKQLTEAVQKITTESIVIWGKTPKFKLPIQKETWETWWTEYWQATWIPEWEFVNTPPLVKLWYQLEKEPIVGAETFYVDGAANRETKLGKAGYVTNRGRQKVVTLTDTTNQKTELQAIYLALQDSGLEVNIVTDSQYALGIIQAQPDQSESELVNQIIEQLIKKEKVYLAWVPAHKGIGGNEQVDKLVSAGIRKV

SEQ ID NO: 93 - protein, 440 aa, unidentified
  REGION 1..440: note = HIV-1
PISPIETVPVKLKPGMDGPKVKQWPLTEEKIKALVEICTEMEKEGKISKIGPENPYNTPVFAIKKKDSTKWRKLVDFRELNKRTQDFWEVQLGIPHPAGLKKKKSVTVLDVGDAYFSVPLDEDFRKYTAFTIPSINNETPGIRYQYNVLPQGWKGSPAIFQSSMTKILEPFRKQNPDIVIYQYMDDLYVGSDLEIGQHRTKIEELRQHLLRWGLTTPDKKHQKEPPFLWMGYELHPDKWTVQPIVLPEKDSWTVNDIQKLVGKLNWASQIYPGIKVRQLCKLLRGTKALTEVIPLTEEAELELAENREILKEPVHGVYYDPSKDLIAEIQKQGQGQWTYQIYQEPFKNLKTGKYARMRGAHTNDVKQLTEAVQKITTESIVIWGKTPKFKLPIQKETWETWWTEYWQATWIPEWEFVNTPPLVKLWYQLEKEPIVGAETF

SEQ ID NO: 94 - protein, 858 aa, unidentified
  REGION 1..858: note = rous sarcoma virus
TVALHLAIPLKWKPNHTPVWIDQWPLPEGKLVALTQLVEKELQLGHIEPSLSCWNTPVFVIRKASGSYRLLHDLRAVNAKLVPFGAVQQGAPVLSALPRGWPLMVLDLKDCFFSIPLAEQDREAFAFTLPSVNNQAPARRFQWKVLPQGMTCSPTICQLIVGQILEPLRLKHPSLRMLHYMDDLLLAASSHDGLEAAGEEVISTLERAGFTISPDKVQKEPGVQYLGYKLGSTYAAPVGLVAEPRIATLWDVQKLVGSLQWLRPALGIPPRLRGPFYEQLRGSDPNEAREWNLDMKMAWREIVQLSTTAALERWDPALPLEGAVARCEQGAIGVLGQGLSTHPRPCLWLFSTQPTKAFTAWLEVLTLLITKLRASAVRTFGKEVDILLLPACFRDELPLPEGILLALRGFAGKIRSSDTPSIFDIARPLHVSLKVRVTDHPVPGPTVFTDASSSTHKGVVVWREGPRWEIKEIADLGASVQQLEARAVAMALLLWPTTPTNVVTDSAFVAKMLLKMGQEGVPSTAAAFILEDALSQRSAMAAVLHVRSHSEVPGFFTEGNDVADSQATFQAYPLREAKDLHTALHIGPRALSKACNISMQQAREVVQTCPHCNSAPALEAGVNPRGLGPLQIWQTDFTLEPRMAPRSWLAVTVDTASSAIVVTQHGRVTSVAAQHHWATVIAVLGRPKAIKTDNGSCFTSKSTREWLARWGIAHTTGIPGNSQGQAMVERANRLLKDKIRVLAEGDGFMKRIPTSKQGELLAKAMYALNHFERGENTKTPIQKHWRPTVLTEGPPVKIRIETGEWEKGWNVLVWGRGYAAVKNRDTDKVIWVPSRKVKPDIAQKDEVTKKDEASPLFA

SEQ ID NO: 95 - protein, 675 aa, unidentified
  REGION 1..675: note = cauliflower mosaic virus
MMDHLLQKTQIQNQTEQVMNITNPNSIYIKGRLYFKGYKKIELHCFVDTGASLCIASKFVIPEEHWINAERPIMVKIADGSSITINKVCRDIDLIIAGEIFHIPTVYQQESGIDFIIGNNFCQLYEPFIQFTDRVIFTKDRTYPVHIAKLTRAVRVGTEGFLESMKKRSKTQQPEPVNISTNKIAILSEGRRLSEEKLFITQQRMQKIEELLEKVCSENPLDPNKTKQWMKASIKLSDPSKAIKVKPMKYSPMDREEFDKQIKELLDLKVIKPSKSPHMAPAFLVNNEAEKRRGKKRMVVNYKAMNKATVGDAYNLPNKDELLTLIRGKKIFSSFDCKSGFWQVLLDQDSRPLTAFTCPQGHYEWNVVPFGLKQAPSIFQRHMDEAFRVFRKFCCVYVDDILVFSNNEEDHLLHVAMILQKCNQHGIILSKKKAQLFKKKINFLGLEIDEGTHKPQGHILEHINKFPDTLEDKKQLQRFLGILTYASDYIPKLAQIRKPLQAKLKENVPWKWTKEDTLYMQKVKKNLQGFPPLHHPLPEEKLIIETDASDDYWGGMLKAIKINEGTNTELICRYASGSFKAAEKNYHSNDKETLAVINTIKKFSIYLTPVHFLIRTDNTHFKSFVNLNYKGDSKLGRNIRWQAWLSHYSFDVEHIKGTDNHFADFLSREFNRVNS

SEQ ID NO: 96 - protein, 366 aa, unidentified
  REGION 1..366: note = Klebsiella pneumonia
MKEKISKIDKNFYTDIFIKTSFQNEFEAGGVIPPIAKNQVSTISNKNKTFYSLAHSSPHYSIQTRIEKFLLKNIPLSASSFAFRKERSYLHYLEPHTQNVKYCHLDIVSFFHSIDVNIVRDTFSVYFSDEFLVKEKQSLLDAFMASVTLTAELDGVEKTFIPMGFKSSPSISNIIFRKIDILIQKFCDKNKITYTRYADDLLFSTKKENNILSSTFFINEISSILSINKFKLNKSKYLYKEGTISLGGYVIENILKDNSSGNIRLSSSKLNPLYKALYEIKKGSSSKHICIKVFNLKLKRFIYKKNKEKFEAKFYSSQLKNKLLGYRSYLLSFVIFHKKYKCINPIFLEKCVFLISEIESIMNRKF

SEQ ID NO: 97 - protein, 263 aa, Escherichia coli
MKITSNNVTAVINGKGWHSINWKKCHQHVKTIQTRIAKAACNQQWRTVGRLQRLLVRSFSARALAVKRVTENSGRKTPGVDGQIWSTPESKWEAIFKLRRKGYKPLPLKRVFIPKSNGKKRPLGIPVMLDRAMQALHLLGLEPVSETNADHNSYGFRPARCTADAIQQVCNMYSSRNASKWVLEGDIKGCFEHISHEWLLENIPMDKQILRNWLKAGIIEKSIFSKTLSGTPQGGIISPVLANMALDGLERLLQNRFGRNRLI

SEQ ID NO: 98 - protein, 438 aa, Streptococcus pyogenes
MSKIKINYEKYHIKPFPHFDQRIKVNKKVKENLQNPFYIAAHSFYPFIHYKKISYKFKNGTLSSPKERDIFYSGHMDGYIYKHYGEILNHKYNNTCIGKGIDHVSLAYRNNKMGKSNIHFAAEVINFISEQQQAFIFVSDFSSYFDSLDHAILKEKLIEVLEEQDKLSKDWWNVFKHITRYNWVEKEEVISDLECTKEKIARDKKSRERYYTPAEFREFRKRVNIKSNDTGVGIPQGTAISAVLANVYAIDLDQKLNQYALKYGGIYRRYSDDIIMVLPMTSDGQDPSNDHVSFIKSVVKRNKVTMGDSKTSVLYYANNNIYEDYQRKRESKMDYLGFSFDGMTVKIREKSLFKYYHRTYKKINSINWASVKKEKKVGRKKLYLLYSHLGRNYKGHGNFISYCKKAHAVFEGNKKIESLINQQIKRHWKKIQKRLVDV

SEQ ID NO: 99 - protein, 426 aa, Eubacterium rectale
DTSNLMEQILSSDNLNRAYLQVVRNKGAEGVDGMKYTELKEHLAKNGETIKGQLRTRKYKPQPARRVEIPKPDGGVRNLGVPTVTDRFIQQAIAQVLTPIYEEQFHDHSYGFRPNRCAQQAILTALNIMNDGNDWIVDIDLEKFFDTVNHDKLMTLIGRTIKDGDVISIVRKYLVSGIMIDDEYEDSIVGTPQGGNLSPLLANIMLNELDKEMEKRGLNFVRYADDCIIMVGSEMSANRVMRNISRFIEEKLGLKVNMTKSKVDRPSGLKYLGFGFYFDPRAHQFKAKPHAKSVAKFKKRMKELTCRSWGVSNSYKVEKLNQLIRGWINYFKIGSMKTLCKELDSRIRYRLRMCIWKQWKTPQNQEKNLVKLGIDRNTARRVAYTGKRIAYVCNKGAVNVAISNKRLASFGLISMLDYYIEKCVTC

SEQ ID NO: 100 - protein, 412 aa, Geobacillus stearothermophilus
ALLERILARDNLITALKRVEANQGAPGIDGVSTDQLRDYIRAHWSTIHAQLLAGTYRPAPVRRVEIPKPGGGTRQLGIPTVVDRLIQQAILQELTPIFDPDFSSSSFGFRPGRNAHDAVRQAQGYIQEGYRYVVDMDLEKFFDRVNHDILMSRVARKVKDKRVLKLIRAYLQAGVMIEGVKVQTEEGTPQGGPLSPLLANILLDDLDKELEKRGLKFCRYADDCNIYVKSLRAGQRVKQSIQRFLEKTLKLKVNEEKSAVDRPWKRAFLGFSFTPERKARIRLAPRSIQRLKQRIRQLTNPNWSISMPERIHRVNQYVMGWIGYFRLVETPSVLQTIEGWIRRRLRLCQWLQWKRVRTRIRELRALGLKETAVMEIANTRKGAWRTTKTPQLHQALGKTYWTAQGLKSLTQR

SEQ ID NO: 101 - RNA, 126 nt, synthetic construct
  misc_feature 1..126: note = Synthetic
  source 1..126: mol_type = other RNA
tacaccatcacggtctatgcgttttagagctagaaatagcaagttaaaataaggctagtccgttatcaacttgaaaaagtggcaccgagtcggtgctatcttcgccccatgcatagaccgtgatgg

SEQ ID NO: 102 - RNA, 126 nt, synthetic construct
  misc_feature 1..126: note = Synthetic
  source 1..126: mol_type = other RNA
cgcgtcgcgctcgtcagatcgttttagagctagaaatagcaagttaaaataaggctagtccgttatcaacttgaaaaagtggcaccgagtcggtgctttccgcctacctgcatctgacgagcgcga

SEQ ID NO: 103 - RNA, 132 nt, synthetic construct
  misc_feature 1..132: note = Synthetic
  source 1..132: mol_type = other RNA
atcggagaatacatgaacatgttttagagctagaaatagcaagttaaaataaggctagtccgttatcaacttgaaaaagtggcaccgagtcggtgccggagaatacatgaacatcggacccgcgctatcttc

SEQ ID NO: 104 - RNA, 126 nt, synthetic construct
  misc_feature 1..126: note = Synthetic
  misc_feature 107..109: note = n is a, c, g, or u
  source 1..126: mol_type = other RNA
tacaccatcacggtctatgcgttttagagctagaaatagcaagttaaaataaggctagtccgttatcaacttgaaaaagtggcaccgagtcggtgctatcttcgccnnntgcatagaccgtgatgg

SEQ ID NO: 105 - RNA, 126 nt, synthetic construct
  misc_feature 1..126: note = Synthetic
  source 1..126: mol_type = other RNA
tacaccatcacggtctatgcgttttagagctagaaatagcaagttaaaataaggctagtccgttatcaacttgaaaaagtggcaccgagtcggtgcgggggggggggggtgcatagaccgtgatgg

SEQ ID NO: 106 - protein, 677 aa, synthetic construct
  REGION 1..677: note = Synthetic
TLNIEDEYRLHETSKEPDVSLGSTWLSDFPQAWAETGGMGLAVRQAPLIIPLKATSTPVSIKQYPMSQEARLGIKPHIQRLLDQGILVPCQSPWNTPLLPVKKPGTNDYRPVQDLREVNKRVEDIHPTVPNPYNLLSGLPPSHQWYTVLDLKDAFFCLRLHPTSQPLFAFEWRDPEMGISGQLTWTRLPQGFKNSPTLFNEALHRDLADFRIQHPDLILLQYVDDLLLAATSELDCQQGTRALLQTLGNLGYRASAKKAQICQKQVKYLGYLLKEGQRWLTEARKETVMGQPTPKTPRQLREFLGTAGFCRLWIPGFAEMAAPLYPLTKTGTLFNWGPDQQKAYQEIKQALLTAPALGLPDLTKPFELFVDEKQGYAKGVLTQKLGPWRRPVAYLSKKLDPVAAGWPPCLRMVAAIAVLTKDAGKLTMGQPLVILAPHAVEALVKQPPDRWLSNARMTHYQALLLDTDRVQFGPVVALNPATLLPLPEEGLQHNCLDILAEAHGTRPDLTDQPLPDADHTWYTDGSSLLQEGQRKAGAAVTTETEVIWAKALPAGTSAQRAELIALTQALKMAEGKKLNVYTDSRYAFATAHIHGEIYRRRGLLTSEGKEIKNKDEILALLKALFLPKRLSIIHCPGHQKGHSAEARGNRMADQAARKAAITETPDTSTLLIENSSP

SEQ ID NO: 107 - protein, 677 aa, synthetic construct
  REGION 1..677: note = Synthetic
TLNIEDEYRLHETSKEPDVSLGSTWLSDFPQAWAETGGMGLAVRQAPLIIPLKATSTPVSIKQYPMSQEARLGIKPHIQRLLDQGILVPCQSPWNTPLLPVKKPGTNDYRPVQDLREVNKRVEDIHPTVPNPYNLLSGLPPSHQWYTVLDLKDAFFCLRLHPTSQPLFAFEWRDPEMGISGQLTWTRLPQGFKNSPTLFNEALHRDLADFRIQHPDLILLQYVDDLLLAATSELDCQQGTRALLQTLGNLGYRASAKKAQICQKQVKYLGYLLKEGQRWLTEARKETVMGQPTPKTPRQLREFLGTAGFCRLWIPGFAEMAAPLYPLTKPGTLFNWGPDQQKAYQEIKQALLTAPALGLPDLTKPFELFVDEKQGYAKGVLTQKLGPWRRPVAYLSKKLDPVAAGWPPCLRMVAAIAVLTKDAGKLTMGQPLVILAPHAVEALVKQPPDRWLSNARMTHYQALLLDTDRVQFGPVVALNPATLLPLPEEGLQHNCLDILAEAHGTRPDLTDQPLPDADHTWYTDGSSLLQEGQRKAGAAVTTETEVIWAKALPAGTSAQRAELIALTQALKMAEGKKLNVYTDSRYAFATAHIHGEIYRRRGLLTSEGKEIKNKDEILALLKALFLPKRLSIIHCPGHQKGHSAEARGNRMADQAARKAAITETPDTSTLLIENSSP

SEQ ID NO: 108 - protein, 677 aa, synthetic construct
  REGION 1..677: note = Synthetic
TLNIEDEYRLHETSKEPDVSLGSTWLSDFPQAWAETGGMGLAVRQAPLIIPLKATSTPVSIKQYPMSQEARLGIKPHIQRLLDQGILVPCQSPWNTPLLPVKKPGTNDYRPVQDLREVNKRVEDIHPTVPNPYNLLSGLPPSHQWYTVLDLKDAFFCLRLHPTSQPLFAFEWRDPEMGISGQLTWTRLPQGFKNSPTLFNEALHRDLADFRIQHPDLILLQYVDDLLLAATSELDCQQGTRALLQTLGNLGYRASAKKAQICQKQVKYLGYLLKEGQRWLTEARKETVMGQPTPKTPRQLREFLGTAGFCRLWIPGFAEMAAPLYPLTKPGTLFNWGPDQQKAYQEIKQALLTAPALGLPDLTKPFELFVDEKQGYAKGVLTQKLGPWRRPVAYLSKKLDPVAAGWPPCLRMVAAIAVLTKDAGKLTMGQPLVILAPHAVEALVKQPPDRWLSNARMTHYQALLLDTDRVQFGPVVALNPATLLPLPEEGLQHNCLDILAEAHGTRPDLTDQPLPDADHTWYTDGSSLLQEGQRKAGAAVTTETEVIWAKALPAGTSAQRAELIALTQALKMAEGKKLNVYTDSRYAFATAHIHGEIYRRRGWLTSEGKEIKNKDEILALLKALFLPKRLSIIHCPGHQKGHSAEARGNRMADQAARKAAITETPDTSTLLIENSSP

SEQ ID NO: 109 - protein, 677 aa, synthetic construct
  REGION 1..677: note = Synthetic
TLNIEDEYRLHETSKEPDVSLGSTWLSDFPQAWAETGGMGLAVRQAPLIIPLKATSTPVSIKQYPMSQKARLGIKPHIQRLLDQGILVPCQSPWNTPLLPVKKPGTNDYRPVQDLREVNKRVEDIHPTVPNPYNLLSGLPPSHQWYTVLDLKDAFFCLRLHPTSQPLFAFEWRDPEMGISGQLTWTRLPQGFKNSPTLFNEALHRDLADFRIQHPDLILLQYVDDLLLAATSELDCQQGTRALLQTLGNLGYRASAKKAQICQKQVKYLGYLLKEGQRWLTEARKETVMGQPTPKTPRQLREFLGTAGFCRLWIPGFAEMAAPLYPLTKPGTLFNWGPDQQKAYQEIKQALLTAPALGLPDLTKPFELFVDEKQGYAKGVLTQKLGPWRRPVAYLSKKLDPVAAGWPPCLRMVAAIAVLTKDAGKLTMGQPLVILAPHAVEALVKQPPDRWLSNARMTHYQALLLDTDRVQFGPVVALNPATLLPLPEEGLQHNCLDILAEAHGTRPDLTDQPLPDADHTWYTDGSSLLQEGQRKAGAAVTTETEVIWAKALPAGTSAQRAELIALTQALKMAEGKKLNVYTDSRYAFATAHIHGEIYRRRGWLTSEGKEIKNKDEILALLKALFLPKRLSIIHCPGHQKGHSAEARGNRMADQAARKAAITETPDTSTLLIENSSP

SEQ ID NO: 110 - protein, 677 aa, synthetic construct
  REGION 1..677: note = Synthetic
TLNIEDEYRLHETSKEPDVSLGSTWLSDFPQAWAETGGMGLAVRQAPLIIPLKATSTPVSIKQYPMSQEARLGIKPHIQRLLDQGILVPCQSPWNTPLLPVKKPGTNDYRPVQDLREVNKRVEDIHPTVPNPYNLLSGLPPSHQWYTVLDLKDAFFCLRLHPTSQPLFAFEWRDPEMGISGQLTWTRLPQGFKNSPTLFNEALHRDLADFRIQHPDLILLQYVDDLLLAATSELDCQQGTRALLQTLGNLGYRASAKKAQICQKQVKYLGYLLKEGQRWLTEARKETVMGQPTPKTPRQLRRFLGTAGFCRLWIPGFAEMAAPLYPLTKPGTLFNWGPDQQKAYQEIKQALLTAPALGLPDLTKPFELFVDEKQGYAKGVLTQKLGPWRRPVAYLSKKLDPVAAGWPPCLRMVAAIAVLTKDAGKLTMGQPLVILAPHAVEALVKQPPDRWLSNARMTHYQALLLDTDRVQFGPVVALNPATLLPLPEEGLQHNCLDILAEAHGTRPDLTDQPLPDADHTWYTDGSSLLQEGQRKAGAAVTTETEVIWAKALPAGTSAQRAELIALTQALKMAEGKKLNVYTDSRYAFATAHIHGEIYRRRGWLTSEGKEIKNKDEILALLKALFLPKRLSIIHCPGHQKGHSAEARGNRMADQAARKAAITETPDTSTLLIENSSP

SEQ ID NO: 111 - protein, 677 aa, synthetic construct
  REGION 1..677: note = Synthetic
TLNIEDEYRLHETSKEPDVSLGSTWLSDFPQAWAETGGMGLAVRQAPLIIPLKATSTPVSIKQYPMSQEARLGIKPHIQRLLDQGILVPCQSPWNTPLLPVKKPGTNDYRPVQDLREVNKRVEDIHPTVPNPYNLLSGLPPSHQWYTVLDLKDAFFCLRLHPTSQPLFAFEWRDPEMGISGQLTWTRLPQGFKNSPTLFNEALHRDLADFRIQHPDLILLQYVDDLLLAATSELDCQQGTRALLQTLGNLGYRASAKKAQICQKQVKYLGYLLKEGQRWLTEARKETVMGQPTPKTPRQLREFLGTAGFCRLWIPGFAEMAAPLYPLTKPGTLFNWGPDQQKAYQEIKQALLTAPALGLPDLTKPFELFVDEKQGYAKGVLTQKLGPWRRPVAYLSKKLDPVAAGWPPCLRMVAAIAVLTKDAGKLTMGQPLVILAPHAVEALVKQPPDRWLSNARMTHYQALLLDTDRVQFGPVVALNPATLLPLPEEGLQHNCLDILAEAHGTRPDLTDQPLPDADHTWYTDGSSLLQEGQRKAGAAVTTETEVIWAKALPAGTSAQRAELIALTQALKMAEGKKLNVYTDSRYAFATAHIHGEIYRRRGWLTSKGKEIKNKDEILALLKALFLPKRLSIIHCPGHQKGHSAEARGNRMADQAARKAAITETPDTSTLLIENSSP

SEQ ID NO: 112 - protein, 677 aa, synthetic construct
  REGION 1..677: note = Synthetic
TLNIEDEYRLHETSKEPDVSLGSTWLSDFPQAWAETGGMGLAVRQAPLIIPLKATSTPVSIKQYPMSQEARLGIKPHIQRLLDQGILVPCQSPWNTPLLPVKKPGTNDYRPVQDLREVNKRVEDIHPTVPNPYNLLSGPPPSHQWYTVLDLKDAFFCLRLHPTSQPLFAFEWRDPEMGISGQLTWTRLPQGFKNSPTLFNEALHRDLADFRIQHPDLILLQYVDDLLLAATSELDCQQGTRALLQTLGNLGYRASAKKAQICQKQVKYLGYLLKEGQRWLTEARKETVMGQPTPKTPRQLREFLGTAGFCRLWIPGFAEMAAPLYPLTKPGTLFNWGPDQQKAYQEIKQALLTAPALGLPDLTKPFELFVDEKQGYAKGVLTQKLGPWRRPVAYLSKKLDPVAAGWPPCLRMVAAIAVLTKDAGKLTMGQPLVILAPHAVEALVKQPPDRWLSNARMTHYQALLLDTDRVQFGPVVALNPATLLPLPEEGLQHNCLDILAEAHGTRPDLTDQPLPDADHTWYTDGSSLLQEGQRKAGAAVTTETEVIWAKALPAGTSAQRAELIALTQALKMAEGKKLNVYTDSRYAFATAHIHGEIYRRRGWLTSEGKEIKNKDEILALLKALFLPKRLSIIHCPGHQKGHSAEARGNRMADQAARKAAITETPDTSTLLIENSSP

SEQ ID NO: 113 - protein, 677 aa, synthetic construct
  REGION 1..677: note = Synthetic
TLNIEDEYRLHETSKEPDVSLGSTWLSDFPQAWAETGGMGLAVRQAPLIIPLKATSTPVSIKQYPMSQEARLGIKPHIQRLLDQGILVPCQSPWNTPLLPVKKPGTNDYRPVQDLREVNKRVEDIHPTVPNPYNLLSGLPPSHQWYTVLDLKDAFFCLRLHPTSQPLFAFEWRDPEMGISGQLTWTRLPQGFKNSPTLFNEALHRDLADFRIQHPDLILLQYVDDLLLAATSELDCQQGTRALLQTLGNLGYRASAKKAQICQKQVKYLGYLLKEGQRWLTEARKETVMGQPTPKTPRQLREFLGTAGFCRLWIPGFAEMAAPLYPLTKPGTLFNWGPDQQKAYQEIKQALLTAPALGLPDLTKPFELFVDEKQGYAKGVLTQKLGPWRRPVAYLSKKLDPVAAGWPPCLRMVAAIAVLTKDAGKLTMGQPLVIGAPHAVEALVKQPPDRWLSNARMTHYQALLLDTDRVQFGPVVALNPATLLPLPEEGLQHNCLDILAEAHGTRPDLTDQPLPDADHTWYTDGSSLLQEGQRKAGAAVTTETEVIWAKALPAGTSAQRAELIALTQALKMAEGKKLNVYTDSRYAFATAHIHGEIYRRRGWLTSEGKEIKNKDEILALLKALFLPKRLSIIHCPGHQKGHSAEARGNRMADQAARKAAITETPDTSTLLIENSSP

SEQ ID NO: 114 - protein, 677 aa, synthetic construct
  REGION 1..677: note = Synthetic
TLNIEDEYRLHETSKEPDVSLGSTWLSDFPQAWAETGGMGLAVRQAPLIIPLKATSTPVSIKQYPMSQEARLGIKPHIQRLLDQGILVPCQSPWNTPLLPVKKPGTNDYRPVQDLREVNKRVEDIHPTVPNPYNLLSGLPPSHQWYTVLDLKDAFFCLRLHPTSQPLFAFEWRDPEMGISGQLTWTRLPQGFKNSPTLFNEALHRDLADFRIQHPDLILLQYVDDLLLAATSELDCQQGTRALLQTLGNLGYRASAKKAQICQKQVKYLGYLLKEGQRWLTEARKETVMGQPTPKTPRQLREFLGTAGFCRLWIPGFAEMAAPLYPLTKPGTLFNWGPDQQKAYQEIKQALLTAPALGLPDLTKPFELFVDEKQGYAKGVLTQKLGPWRRPVAYLSKKLDPVAAGWPPCLRMVAAIAVLTKDAGKLTMGQPLVILAPHAVEALVKQPPDRWLSKARMTHYQALLLDTDRVQFGPVVALNPATLLPLPEEGLQHNCLDILAEAHGTRPDLTDQPLPDADHTWYTDGSSLLQEGQRKAGAAVTTETEVIWAKALPAGTSAQRAELIALTQALKMAEGKKLNVYTDSRYAFATAHIHGEIYRRRGWLTSEGKEIKNKDEILALLKALFLPKRLSIIHCPGHQKGHSAEARGNRMADQAARKAAITETPDTSTLLIENSSP

SEQ ID NO: 115 - protein, 677 aa, synthetic construct
  REGION 1..677: note = Synthetic
TLNIEDEYRLHETSKEPDVSLGSTWLSDFPQAWAETGGMGLAVRQAPLIIPLKATSTPVSIKQYPMSQEARLGIKPHIQRLLDQGILVPCQSPWNTPLLPVKKPGTNDYRPVQDLREVNKRVEDIHPTVPNPYNLLSGLPPSHQWYTVLDLKDAFFCLRLHPTSQPLFAFEWRDPEMGISGQLTWTRLPQGFKNSPTLFNEALHRDLADFRIQHPDLILLQYVDDLLLAATSELDCQQGTRALLQTLGNLGYRASAKKAQICQKQVKYLGYLLKEGQRWLTEARKETVMGQPTPKTPRQLREFLGKAGFCRLWIPGFAEMAAPLYPLTKPGTLFNWGPDQQKAYQEIKQALLTAPALGLPDLTKPFELFVDEKQGYAKGVLTQKLGPWRRPVAYLSKKLDPVAAGWPPCLRMVAAIAVLTKDAGKLTMGQPLVILAPHAVEALVKQPPDRWLSNARMTHYQALLLDTDRVQFGPVVALNPATLLPLPEEGLQHNCLDILAEAHGTRPDLTDQPLPDADHTWYTDGSSLLQEGQRKAGAAVTTETEVIWAKALPAGTSAQRAELIALTQALKMAEGKKLNVYTDSRYAFATAHIHGEIYRRRGWLTSEGKEIKNKDEILALLKALFLPKRLSIIHCPGHQKGHSAEARGNRMADQAARKAAITETPDTSTLLIENSSP

SEQ ID NO: 116 - protein, 677 aa, synthetic construct
  REGION 1..677: note = Synthetic
TLNIEDEYRLHETSKEPDVSLGSTWLSDFPQAWAETGGMGLAVRQAPLIIPLKATSTPVSIKQYPMSQEARLGIKPHIQRLLDQGILVPCQSPWNTPLLPVKKPGTNDYRPVQDLREVNKRVEDIHPTVPNPYNLLSGLPPSHQWYTVLDLKDAFFCLRLHPTSQPLFAFEWRDPEMGISGQLTWTRLPQGFKNSPTLFNEALHRDLADFRIQHPDLILLQYVDDLLLAATSELDCQQGTRALLQTLGNLGYRASAKKAQICQKQVKYLGYLLKEGQRWLTEARKETVMGQPTPKTPRQLREFLGTAGFCRLFIPGFAEMAAPLYPLTKPGTLFNWGPDQQKAYQEIKQALLTAPALGLPDLTKPFELFVDEKQGYAKGVLTQKLGPWRRPVAYLSKKLDPVAAGWPPCLRMVAAIAVLTKDAGKLTMGQPLVILAPHAVEALVKQPPDRWLSNARMTHYQALLLDTDRVQFGPVVALNPATLLPLPEEGLQHNCLDILAEAHGTRPDLTDQPLPDADHTWYTDGSSLLQEGQRKAGAAVTTETEVIWAKALPAGTSAQRAELIALTQALKMAEGKKLNVYTDSRYAFATAHIHGEIYRRRGWLTSEGKEIKNKDEILALLKALFLPKRLSIIHCPGHQKGHSAEARGNRMADQAARKAAITETPDTSTLLIENSSP

SEQ ID NO: 117 - protein, 677 aa, synthetic construct
  REGION 1..677: note = Synthetic
TLNIEDEYRLHETSKEPDVSLGSTWLSDFPQAWAETGGMGLAVRQAPLIIPLKATSTPVSIKQYPMSQEARLGIKPHIQRLLDQGILVPCQSPWNTPLLPVKKPGTNDYRPVQDLREVNKRVEDIHPTVPNPYNLLSGLPPSHQWYTVLDLKDAFFCLRLHPTSQPLFAFEWRDPEMGISGQLTWTRLPQGFKNSPTLFNEALHRDLADFRIQHPDLILLQYVDDLLLAATSELDCQQGTRALLQTLGNLGYRASAKKAQICQKQVKYLGYLLKEGQRWLTEARKETVMGQPTPKTPRQLREFLGTAGFCRLWIPGFAEMAAPLYPLTKPGTLFNWGPDQQKAYQEIKQALLTAPALGLPDLTKPFELFVDEKQGYAKGVLTQKLGPWRRPVAYLSKKLDPVAAGWPPCLRMVAAIAVLTKDAGKLTMGQPLVILAPHAVEALVKQPPDRWLSNARMTHYQALLLDTDRVQFGPVVALNPATLLPLPEEGLQHNCLDILAEAHGTRPDLTDQPLPDADHTWYTGGSSLLQEGQRKAGAAVTTETEVIWAKALPAGTSAQRAQLIALTQALKMAEGKKLNVYTNSRYAFATAHIHGEIYRRRGWLTSEGKEIKNKDEILALLKALFLPKRLSIIHCPGHQKGHSAEARGNRMADQAARKAAITETPDTSTLLIENSSP

SEQ ID NO: 118 - protein, 677 aa, synthetic construct
  REGION 1..677: note = Synthetic
TLNIEDEYRLHETSKEPDVSLGSTWLSDFPQAWAETGGMGLAVRQAPLIIPLKATSTPVSIKQYPMSQEARLGIKPHIQRLLDQGILVPCQSPWNTPLLPVKKPGTNDYRPVQDLREVNKRVEDIHPTVPNPYNLLSGLPPSHQWYTVLDLKDAFFCLRLHPTSQPLFAFEWRDPEMGISGQLTWTRLPQGFKNSPTLFNEALHRDLADFRIQHPDLILLQYVDDLLLAATSELDCQQGTRALLQTLGNLGYRASAKKAQICQKQVKYLGYLLKEGQRWLTEARKETVMGQPTPKTPRQLRRFLGTAGFCRLFIPGFAEMAAPLYPLTKPGTLFNWGPDQQKAYQEIKQALLTAPALGLPDLTKPFELFVDEKQGYAKGVLTQKLGPWRRPVAYLSKKLDPVAAGWPPCLRMVAAIAVLTKDAGKLTMGQPLVILAPHAVEALVKQPPDRWLSNARMTHYQALLLDTDRVQFGPVVALNPATLLPLPEEGLQHNCLDILAEAHGTRPDLTDQPLPDADHTWYTDGSSLLQEGQRKAGAAVTTETEVIWAKALPAGTSAQRAELIALTQALKMAEGKKLNVYTDSRYAFATAHIHGEIYRRRGWLTSEGKEIKNKDEILALLKALFLPKRLSIIHCPGHQKGHSAEARGNRMADQAARKAAITETPDTSTLLIENSSP

SEQ ID NO: 119 - protein, 677 aa, synthetic construct
  REGION 1..677: note = Synthetic
TLNIEDEYRLHETSKEPDVSLGSTWLSDFPQAWAETGGMGLAVRQAPLIIPLKATSTPVSIKQYPMSQEARLGIKPHIQRLLDQGILVPCQSPWNTPLLPVKKPGTNDYRPVQDLREVNKRVEDIHPTVPNPYNLLSGPPPSHQWYTVLDLKDAFFCLRLHPTSQPLFAFEWRDPEMGISGQLTWTRLPQGFKNSPTLFNEALHRDLADFRIQHPDLILLQYVDDLLLAATSELDCQQGTRALLQTLGNLGYRASAKKAQICQKQVKYLGYLLKEGQRWLTEARKETVMGQPTPKTPRQLREFLGTAGFCRLWIPGFAEMAAPLYPLTKPGTLFNWGPDQQKAYQEIKQALLTAPALGLPDLTKPFELFVDEKQGYAKGVLTQKLGPWRRPVAYLSKKLDPVAAGWPPCLRMVAAIAVLTKDAGKLTMGQPLVILAPHAVEALVKQPPDRWLSNARMTHYQALLLDTDRVQFGPVVALNPATLLPLPEEGLQHNCLDILAEAHGTRPDLTDQPLPDADHTWYTDGSSLLQEGQRKAGAAVTTETEVIWAKALPAGTSAQRAELIALTQALKMAEGKKLNVYTDSRYAFATAHIHGEIYRRRGWLTSKGKEIKNKDEILALLKALFLPKRLSIIHCPGHQKGHSAEARGNRMADQAARKAAITETPDTSTLLIENSSP

SEQ ID NO: 120 - protein, 677 aa, synthetic construct
  REGION 1..677: note = Synthetic
TLNIEDEYRLHETSKEPDVSLGSTWLSDFPQAWAETGGMGLAVRQAPLIILLKATSTPVSIKQYPMKQEARLGIKPHIQRLLDQGILVPCQSPWNTPLLPVKKPGTNDYRPVQDLREVNKRVEDIHPTVPNPYNLLSGLPPSHQWYTVLDLKDAFFCLRLHPTSQPLFAFEWRDPEMGISGQLTWTRLPQGFKNSPALFDEALRRDLADFRIQHPDLILLQYVDDLLLAATSELDCQQGTRALLQTLGNLGYRASAKKAQICQKQVKYLGYLLKEGQRWLTEARKETVMGQPTPKTPRQLRKFLGTAGNCRLFIPGFAEMAAPLYPLTKPGTLFNWGPDQQKAYQEIKQALLTAPALGLPDLTKPFELFVDEKQGYAKGVLTQKLGPWRRPVAYLSKKLDPVAAGWPPCLRMVAAIAVLTKDAGKLTMGQPLVIGAPHAVEALVKQPPDRWLSKARMTHYQALLLDTDRVQFGPVVALNPATLLPLPEEGLQHNCLDILAEAHGTRPDLTDQPLPDADHTWYTGGSSLLQEGQRKAGAAVTTETEVIWAKALPAGTSAQRAELIALTQALKMAEGKKLNVYTNSRYAFATAHIQGEIYRRRGLLTSEGKEIKNKDEILALLKALFLPKRLSIIHCPGHQKGHSAEARGNRMANQAARKAAITETPDTSTLLIENSSP

SEQ ID NO: 121 - protein, 677 aa, synthetic construct
  REGION 1..677: note = Synthetic
TLNIEDEYRLHETSKEPDVSLGSTWLSDFPQAWAETGGMGLAVRQAPLIILLKATSTPVSIKQYPMKQEARLGIKPHIQRLLDQGILVPCQSPWNTPLLPVKKPGTNDYRPVQDLREVNKRVEDIHPTVPNPYNLLSGLPPSHQWYTVLDLKDAFFCLRLHPTSQPLFAFEWRDPEMGISGQLTWTRLPQGFKNSPALFNEALRRDLADFRIQHPDLILLQYVDDLLLAATSELDCQQGTRALLQTLGNLGYRASAKKAQICQKQVKYLGYLLKEGQRWLTEARKETVMGQPTPKTPRQLRKFLGTAGNCRLFIPGFAEMAAPLYPLTKPGTLFNWGPDQQKAYQEIKQALLTAPALGLPDLTKPFELFVDEKQGYAKGVLTQKLGPWRRPVAYLSKKLDPVAAGWPPCLRMVAAIAVLTKDAGKLTMGQPLVIGAPHAVEALVKQPPDRWLSKARMTHYQALLLDTDRVQFGPVVALNPATLLPLPEEGLQHNCLDILAEAHGTRPDLTDQPLPDADHTWYTGGSSLLQEGQRKAGAAVTTETEVIWAKALPAGTSAQRAELIALTQALKMAEGKKLNVYTNSRYAFATAHIQGEIYRRRGLLTSEGKEIKNKDEILALLKALFLPKRLSIIHCPGHQKGHSAEARGNRMANQAARKAAITETPDTSTLLIENSSP

SEQ ID NO: 122 - protein, 677 aa, synthetic construct
  REGION 1..677: note = Synthetic
TLNIEDEYRLHETSKEPDVSLGSTWLSDFPQAWAETGGMGLAVRQAPLIIPLKATSTPVSIKQYPMSQEARLGIKPHIQRLLDQGILVPCQSPWNTPLLPVKKPGTNDYRPVQDLREVNKRVEDIHPTVPNPYNLLSGLPPSHQWYTVLDLKDAFFCLRLHPTSQPLFAFEWRDPEMGISGQLTWTRLPQGFKNSPTLFNEALHRDLADFRIQHPDLILLQYVDDLLLAATSELDCQQGTRALLQTLGNLGYRASAKKAQICQKQVKYLGYLLKEGQRWLTEARKETVMGQPTPKTPRQLREFLGKAGFCRLFIPGFAEMAAPLYPLTKPGTLFNWGPDQQKAYQEIKQALLTAPALGLPDLTKPFELFVDEKQGYAKGVLTQKLGPWRRPVAYLSKKLDPVAAGWPPCLRMVAAIAVLTKDAGKLTMGQPLVILAPHAVEALVKQPPDRWLSNARMTHYQALLLDTDRVQFGPVVALNPATLLPLPEEGLQHNCLDILAEAHGTRPDLTDQPLPDADHTWYTDGSSLLQEGQRKAGAAVTTETEVIWAKALPAGTSAQRAELIALTQALKMAEGKKLNVYTDSRYAFATAHIHGEIYRRRGWLTSEGKEIKNKDEILALLKALFLPKRLSIIHCPGHQKGHSAEARGNRMADQAARKAAITETPDTSTLLIENSSP

SEQ ID NO: 123 - protein, 2117 aa, synthetic construct
  REGION 1..2117: note = Synthetic
MKRTADGSEFESPKKKRKVDKKYSIGLDIGTNSVGWAVITDEYKVPSKKFKVLGNTDRHSIKKNLIGALLFDSGETAEATRLKRTARRRYTRRKNRICYLQEIFSNEMAKVDDSFFHRLEESFLVEEDKKHERHPIFGNIVDEVAYHEKYPTIYHLRKKLVDSTDKADLRLIYLALAHMIKFRGHFLIEGDLNPDNSDVDKLFIQLVQTYNQLFEENPINASGVDAKAILSARLSKSRRLENLIAQLPGEKKNGLFGNLIALSLGLTPNFKSNFDLAEDAKLQLSKDTYDDDLDNLLAQIGDQYADLFLAAKNLSDAILLSDILRVNTEITKAPLSASMIKRYDEHHQDLTLLKALVRQQLPEKYKEIFFDQSKNGYAGYIDGGASQEEFYKFIKPILEKMDGTEELLVKLNREDLLRKQRTFDNGSIPHQIHLGELHAILRRQEDFYPFLKDNREKIEKILTFRIPYYVGPLARGNSRFAWMTRKSEETITPWNFEEVVDKGASAQSFIERMTNFDKNLPNEKVLPKHSLLYEYFTVYNELTKVKYVTEGMRKPAFLSGEQKKAIVDLLFKTNRKVTVKQLKEDYFKKIECFDSVEISGVEDRFNASLGTYHDLLKIIKDKDFLDNEENEDILEDIVLTLTLFEDREMIEERLKTYAHLFDDKVMKQLKRRRYTGWGRLSRKLINGIRDKQSGKTILDFLKSDGFANRNFMQLIHDDSLTFKEDIQKAQVSGQGDSLHEHIANLAGSPAIKKGILQTVKVVDELVKVMGRHKPENIVIEMARENQTTQKGQKNSRERMKRIEEGIKELGSQILKEHPVENTQLQNEKLYLYYLQNGRDMYVDQELDINRLSDYDVDAIVPQSFLKDDSIDNKVLTRSDKNRGKSDNVPSEEVVKKMKNYWRQLLNAKLITQRKFDNLTKAERGGLSELDKAGFIKRQLVETRQITKHVAQILDSRMNTKYDENDKLIREVKVITLKSKLVSDFRKDFQFYKVREINNYHHAHDAYLNAVVGTALIKKYPKLESEFVYGDYKVYDVRKMIAKSEQEIGKATAKYFFYSNIMNFFKTEITLANGEIRKRPLIETNGETGEIVWDKGRDFATVRKVLSMPQVNIVKKTEVQTGGFSKESILPKRNSDKLIARKKDWDPKKYGGFDSPTVAYSVLVVAKVEKGKSKKLKSVKELLGITIMERSSFEKNPIDFLEAKGYKEVKKDLIIKLPKYSLFELENGRKRMLASAGELQKGNELALPSKYVNFLYLASHYEKLKGSPEDNEQKQLFVEQHKHYLDEIIEQISEFSKRVILADANLDKVLSAYNKHRDKPIREQAENIIHLFTLTNLGAPAAFKYFDTTIDRKRYTSTKEVLDATLIHQSITGLYETRIDLSQLGGDSGGSSGGSSGSETPGTSESATPESSGGSSGGSSTLNIEDEYRLHETSKEPDVSLGSTWLSDFPQAWAETGGMGLAVRQAPLIIPLKATSTPVSIKQYPMSQEARLGIKPHIQRLLDQGILVPCQSPWNTPLLPVKKPGTNDYRPVQDLREVNKRVEDIHPTVPNPYNLLSGLPPSHQWYTVLDLKDAFFCLRLHPTSQPLFAFEWRDPEMGISGQLTWTRLPQGFKNSPTLFDEALHRDLADFRIQHPDLILLQYVDDLLLAATSELDCQQGTRALLQTLGNLGYRASAKKAQICQKQVKYLGYLLKEGQRWLTEARKETVMGQPTPKTPRQLREFLGTAGFCRLWIPGFAEMAAPLYPLTKTGTLFNWGPDQQKAYQEIKQALLTAPALGLPDLTKPFELFVDEKQGYAKGVLTQKLGPWRRPVAYLSKKLDPVAAGWPPCLRMVAAIAVLTKDAGKLTMGQPLVILAPHAVEALVKQPPDRWLSNARMTHYQALLLDTDRVQFGPVVALNPATLLPLPEEGLQHNCLDILAEAHGTRPDLTDQPLPDADHTWYTDGSSLLQEGQRKAGAAVTTETEVIWAKALPAGTSAQRAELIALTQALKMAEGKKLNVYTDSRYAFATAHIHGEIYRRRGLLTSEGKEIKNKDEILALLKALFLPKRLSIIHCPGHQKGHSAEARGNRMADQAARKAAITETPDTSTLLIENSSPSGGSKRTADGSEFEPKKKRKV

SEQ ID NO: 124 - protein, 19 aa, synthetic construct
  REGION 1..19: note = Synthetic
MKRTADGSEFESPKKKRKV

SEQ ID NO: 125 - protein, 17 aa, synthetic construct
  REGION 1..17: note = Synthetic
KRTADGSEFEPKKKRKV

SEQ ID NO: 126 - protein, 1367 aa, Streptococcus pyogenes; identical to SEQ ID NO: 55

SEQ ID NO: 127 - protein, 33 aa, synthetic construct
  REGION 1..33: note = Synthetic
SGGSSGGSSGSETPGTSESATPESSGGSSGGSS

SEQ ID NO: 128 - protein, 677 aa, unidentified; identical to SEQ ID NO: 89
  REGION 1..677: note = moloney murine leukemia virus

SEQ ID NO: 129 - protein, 328 aa, unidentified
  REGION 1..328: note = Bordetella phage
MGKRHRNLIDQITTWENLLDAYRKTSHGKRRTWGYLEFKEYDLANLLALQAELKAGNYERGPYREFLVYEPKPRLISALEFKDRLVQHALCNIVAPIFEAGLLPYTYACRPDKGTHAGVCHVQAELRRTRATHFLKSDFSKFFPSIDRAALYAMIDKKIHCAATRRLLRVVLPDEGVGIPIGSLTSQLFANVYGGAVDRLLHDELKQRHWARYMDDIVVLGDDPEELRAVFYRLRDFASERLGLKISHWQVAPVSRGINFLGYRIWPTHKLLRKSSVKRAKRKVANFIKHGEDESLQRFLASWSGHAQWADTHNLFTWMEEQYGIACH

SEQ ID NO: 130 - protein, 1367 aa, Streptococcus pyogenes; identical to SEQ ID NO: 55

SEQ ID NO: 131 - DNA, 76 bp, synthetic construct
  misc_feature 1..76: note = Synthetic
  source 1..76: mol_type = other DNA
gttttagagctagaaatagcaagttaaaataaggctagtccgttatcaacttgaaaaagtggcaccgagtcggtgc

SEQ ID NO: 132 - protein, 677 aa, unidentified; identical to SEQ ID NO: 89
  REGION 1..677: note = moloney murine leukemia virus

SEQ ID NO: 133 - protein, 21 aa, synthetic construct
  REGION 1..21: note = Synthetic
SGGSKRTADGSEFEPKKKRKV

SEQ ID NO: 134 - protein, 2117 aa, synthetic construct
  REGION 1..2117: note = Synthetic
MKRTADGSEFESPKKKRKVDKKYSIGLDIGTNSVGWAVITDEYKVPSKKFKVLGNTDRHSIKKNLIGALLFDSGETAEATRLKRTARRRYTRRKNRICYLQEIFSNEMAKVDDSFFHRLEESFLVEEDKKHERHPIFGNIVDEVAYHEKYPTIYHLRKKLVDSTDKADLRLIYLALAHMIKFRGHFLIEGDLNPDNSDVDKLFIQLVQTYNQLFEENPINASGVDAKAILSARLSKSRRLENLIAQLPGEKKNGLFGNLIALSLGLTPNFKSNFDLAEDAKLQLSKDTYDDDLDNLLAQIGDQYADLFLAAKNLSDAILLSDILRVNTEITKAPLSASMIKRYDEHHQDLTLLKALVRQQLPEKYKEIFFDQSKNGYAGYIDGGASQEEFYKFIKPILEKMDGTEELLVKLNREDLLRKQRTFDNGSIPHQIHLGELHAILRRQEDFYPFLKDNREKIEKILTFRIPYYVGPLARGNSRFAWMTRKSEETITPWNFEEVVDKGASAQSFIERMTNFDKNLPNEKVLPKHSLLYEYFTVYNELTKVKYVTEGMRKPAFLSGEQKKAIVDLLFKTNRKVTVKQLKEDYFKKIECFDSVEISGVEDRFNASLGTYHDLLKIIKDKDFLDNEENEDILEDIVLTLTLFEDREMIEERLKTYAHLFDDKVMKQLKRRRYTGWGRLSRKLINGIRDKQSGKTILDFLKSDGFANRNFMQLIHDDSLTFKEDIQKAQVSGQGDSLHEHIANLAGSPAIKKGILQTVKVVDELVKVMGRHKPENIVIEMARENQTTQKGQKNSRERMKRIEEGIKELGSQILKEHPVENTQLQNEKLYLYYLQNGRDMYVDQELDINRLSDYDVDAIVPQSFLKDDSIDNKVLTRSDKNRGKSDNVPSEEVVKKMKNYWRQLLNAKLITQRKFDNLTKAERGGLSELDKAGFIKRQLVETRQITKHVAQILDSRMNTKYDENDKLIREVKVITLKSKLVSDFRKDFQFYKVREINNYHHAHDAYLNAVVGTALIKKYPKLESEFVYGDYKVYDVRKMIAKSEQEIGKATAKYFFYSNIMNFFKTEITLANGEIRKRPLIETNGETGEIVWDKGRDFATVRKVLSMPQVNIVKKTEVQTGGFSKESILPKRNSDKLIARKKDWDPKKYGGFDSPTVAYSVLVVAKVEKGKSKKLKSVKELLGITIMERSSFEKNPIDFLEAKGYKEVKKDLIIKLPKYSLFELENGRKRMLASAGELQKGNELALPSKYVNFLYLASHYEKLKGSPEDNEQKQLFVEQHKHYLDEIIEQISEFSKRVILADANLDKVLSAYNKHRDKPIREQAENIIHLFTLTNLGAPAAFKYFDTTIDRKRYTSTKEVLDATLIHQSITGLYETRIDLSQLGGDSGGSSGGSSGSETPGTSESATPESSGGSSGGSSTLNIEDEYRLHETSKEPDVSLGSTWLSDFPQAWAETGGMGLAVRQAPLIIPLKATSTPVSIKQYPMSQEARLGIKPHIQRLLDQGILVPCQSPWNTPLLPVKKPGTNDYRPVQDLREVNKRVEDIHPTVPNPYNLLSGLPPSHQWYTVLDLKDAFFCLRLHPTSQPLFAFEWRDPEMGISGQLTWTRLPQGFKNSPTLFNEALHRDLADFRIQHPDLILLQYVDDLLLAATSELDCQQGTRALLQTLGNLGYRASAKKAQICQKQVKYLGYLLKEGQRWLTEARKETVMGQPTPKTPRQLREFLGKAGFCRLFIPGFAEMAAPLYPLTKPGTLFNWGPDQQKAYQEIKQALLTAPALGLPDLTKPFELFVDEKQGYAKGVLTQKLGPWRRPVAYLSKKLDPVAAGWPPCLRMVAAIAVLTKDAGKLTMGQPLVILAPHAVEALVKQPPDRWLSNARMTHYQALLLDTDRVQFGPVVALNPATLLPLPEEGLQHNCLDILAEAHGTRPDLTDQPLPDADHTWYTDGSSLLQEGQRKAGAAVTTETEVIWAKALPAGTSAQRAELIALTQALKMAEGKKLNVYTDSRYAFATAHIHGEIYRRRGWLTSEGKEIKNKDEILALLKALFLPKRLSIIHCPGHQKGHSAEARGNRMADQAARKAAITETPDTSTLLIENSSPSGGSKRTADGSEFEPKKKRKV

SEQ ID NO: 135 - skipped

SEQ ID NO: 136 - protein, 19 aa, synthetic construct
  REGION 1..19: note = Synthetic
NLSKRPAAIKKAGQAKKKK

SEQ ID NO: 137 - protein, 1367 aa, Streptococcus pyogenes; identical to SEQ ID NO: 55

SEQ ID NO: 138 - skipped

SEQ ID NO: 139 - protein, 677 aa, synthetic construct; identical to SEQ ID NO: 122
  REGION 1..677: note = Synthetic

SEQ ID NO: 140 - skipped

SEQ ID NO: 141 - protein, 1367 aa, Streptococcus pyogenes; identical to SEQ ID NO: 55

SEQ ID NO: 142 - skipped

SEQ ID NO: 143 - protein, 677 aa, synthetic construct; identical to SEQ ID NO: 122
  REGION 1..677: note = Synthetic

SEQ ID NO: 144 - skipped

SEQ ID NO: 145 - protein, 2117 aa, synthetic construct
  REGION 1..2117: note = Synthetic
MKRTADGSEFESPKKKRKVTLNIEDEYRLHETSKEPDVSLGSTWLSDFPQAWAETGGMGLAVRQAPLIIPLKATSTPVSIKQYPMSQEARLGIKPHIQRLLDQGILVPCQSPWNTPLLPVKKPGTNDYRPVQDLREVNKRVEDIHPTVPNPYNLLSGLPPSHQWYTVLDLKDAFFCLRLHPTSQPLFAFEWRDPEMGISGQLTWTRLPQGFKNSPTLFDEALHRDLADFRIQHPDLILLQYVDDLLLAATSELDCQQGTRALLQTLGNLGYRASAKKAQICQKQVKYLGYLLKEGQRWLTEARKETVMGQPTPKTPRQLREFLGTAGFCRLWIPGFAEMAAPLYPLTKTGTLFNWGPDQQKAYQEIKQALLTAPALGLPDLTKPFELFVDEKQGYAKGVLTQKLGPWRRPVAYLSKKLDPVAAGWPPCLRMVAAIAVLTKDAGKLTMGQPLVILAPHAVEALVKQPPDRWLSNARMTHYQALLLDTDRVQFGPVVALNPATLLPLPEEGLQHNCLDILAEAHGTRPDLTDQPLPDADHTWYTDGSSLLQEGQRKAGAAVTTETEVIWAKALPAGTSAQRAELIALTQALKMAEGKKLNVYTDSRYAFATAHIHGEIYRRRGLLTSEGKEIKNKDEILALLKALFLPKRLSIIHCPGHQKGHSAEARGNRMADQAARKAAITETPDTSTLLIENSSPSGGSSGGSSGSETPGTSESATPESSGGSSGGSSDKKYSIGLDIGTNSVGWAVITDEYKVPSKKFKVLGNTDRHSIKKNLIGALLFDSGETAEATRLKRTARRRYTRRKNRICYLQEIFSNEMAKVDDSFFHRLEESFLVEEDKKHERHPIFGNIVDEVAYHEKYPTIYHLRKKLVDSTDKADLRLIYLALAHMIKFRGHFLIEGDLNPDNSDVDKLFIQLVQTYNQLFEENPINASGVDAKAILSARLSKSRRLENLIAQLPGEKKNGLFGNLIALSLGLTPNFKSNFDLAEDAKLQLSKDTYDDDLDNLLAQIGDQYADLFLAAKNLSDAILLSDILRVNTEITKAPLSASMIKRYDEHHQDLTLLKALVRQQLPEKYKEIFFDQSKNGYAGYIDGGASQEEFYKFIKPILEKMDGTEELLVKLNREDLLRKQRTFDNGSIPHQIHLGELHAILRRQEDFYPFLKDNREKIEKILTFRIPYYVGPLARGNSRFAWMTRKSEETITPWNFEEVVDKGASAQSFIERMTNFDKNLPNEKVLPKHSLLYEYFTVYNELTKVKYVTEGMRKPAFLSGEQKKAIVDLLFKTNRKVTVKQLKEDYFKKIECFDSVEISGVEDRFNASLGTYHDLLKIIKDKDFLDNEENEDILEDIVLTLTLFEDREMIEERLKTYAHLFDDKVMKQLKRRRYTGWGRLSRKLINGIRDKQSGKTILDFLKSDGFANRNFMQLIHDDSLTFKEDIQKAQVSGQGDSLHEHIANLAGSPAIKKGILQTVKVVDELVKVMGRHKPENIVIEMARENQTTQKGQKNSRERMKRIEEGIKELGSQILKEHPVENTQLQNEKLYLYYLQNGRDMYVDQELDINRLSDYDVDAIVPQSFLKDDSIDNKVLTRSDKNRGKSDNVPSEEVVKKMKNYWRQLLNAKLITQRKFDNLTKAERGGLSELDKAGFIKRQLVETRQITKHVAQILDSRMNTKYDENDKLIREVKVITLKSKLVSDFRKDFQFYKVREINNYHHAHDAYLNAVVGTALIKKYPKLESEFVYGDYKVYDVRKMIAKSEQEIGKATAKYFFYSNIMNFFKTEITLANGEIRKRPLIETNGETGEIVWDKGRDFATVRKVLSMPQVNIVKKTEVQTGGFSKESILPKRNSDKLIARKKDWDPKKYGGFDSPTVAYSVLVVAKVEKGKSKKLKSVKELLGITIMERSSFEKNPIDFLEAKGYKEVKKDLIIKLPKYSLFELENGRKRMLASAGELQKGNELALPSKYVNFLYLASHYEKLKGSPEDNEQKQLFVEQHKHYLDEIIEQISEFSKRVILADANLDKVLSAYNKHRDKPIREQAENIIHLFTLTNLGAPAAFKYFDTTIDRKRYTSTKEVLDATLIHQSITGLYETRIDLSQLGGDSGGSKRTADGSEFEPKKKRKV

SEQ ID NO: 146 - skipped

SEQ ID NO: 147 - protein, 1367 aa, Streptococcus pyogenes; identical to SEQ ID NO: 55

SEQ ID NO: 148 - skipped

SEQ ID NO: 149 - protein, 677 aa, unidentified; identical to SEQ ID NO: 89
  REGION 1..677: note = moloney murine leukemia virus

SEQ ID NO: 150 - protein, 2144 aa, synthetic construct
  REGION 1..2144: note = Synthetic
MKRTADGSEFESPKKKRKVTLNIEDEYRLHETSKEPDVSLGSTWLSDFPQAWAETGGMGLAVRQAPLIIPLKATSTPVSIKQYPMSQEARLGIKPHIQRLLDQGILVPCQSPWNTPLLPVKKPGTNDYRPVQDLREVNKRVEDIHPTVPNPYNLLSGLPPSHQWYTVLDLKDAFFCLRLHPTSQPLFAFEWRDPEMGISGQLTWTRLPQGFKNSPTLFDEALHRDLADFRIQHPDLILLQYVDDLLLAATSELDCQQGTRALLQTLGNLGYRASAKKAQICQKQVKYLGYLLKEGQRWLTEARKETVMGQPTPKTPRQLREFLGTAGFCRLWIPGFAEMAAPLYPLTKTGTLFNWGPDQQKAYQEIKQALLTAPALGLPDLTKPFELFVDEKQGYAKGVLTQKLGPWRRPVAYLSKKLDPVAAGWPPCLRMVAAIAVLTKDAGKLTMGQPLVILAPHAVEALVKQPPDRWLSNARMTHYQALLLDTDRVQFGPVVALNPATLLPLPEEGLQHNCLDILAEAHGTRPDLTDQPLPDADHTWYTDGSSLLQEGQRKAGAAVTTETEVIWAKALPAGTSAQRAELIALTQALKMAEGKKLNVYTDSRYAFATAHIHGEIYRRRGLLTSEGKEIKNKDEILALLKALFLPKRLSIIHCPGHQKGHSAEARGNRMADQAARKAAITETPDTSTLLIENSSPSGGSSGGSSGSETPGTSESATPESAGSYPYDVPDYAGSAAPAAKKKKLDGSGSGGSSGGSDKKYSIGLDIGTNSVGWAVITDEYKVPSKKFKVLGNTDRHSIKKNLIGALLFDSGETAEATRLKRTARRRYTRRKNRICYLQEIFSNEMAKVDDSFFHRLEESFLVEEDKKHERHPIFGNIVDEVAYHEKYPTIYHLRKKLVDSTDKADLRLIYLALAHMIKFRGHFLIEGDLNPDNSDVDKLFIQLVQTYNQLFEENPINASGVDAKAILSARLSKSRRLENLIAQLPGEKKNGLFGNLIALSLGLTPNFKSNFDLAEDAKLQLSKDTYDDDLDNLLAQIGDQYADLFLAAKNLSDAILLSDILRVNTEITKAPLSASMIKRYDEHHQDLTLLKALVRQQLPEKYKEIFFDQSKNGYAGYIDGGASQEEFYKFIKPILEKMDGTEELLVKLNREDLLRKQRTFDNGSIPHQIHLGELHAILRRQEDFYPFLKDNREKIEKILTFRIPYYVGPLARGNSRFAWMTRKSEETITPWNFEEVVDKGASAQSFIERMTNFDKNLPNEKVLPKHSLLYEYFTVYNELTKVKYVTEGMRKPAFLSGEQKKAIVDLLFKTNRKVTVKQLKEDYFKKIECFDSVEISGVEDRFNASLGTYHDLLKIIKDKDFLDNEENEDILEDIVLTLTLFEDREMIEERLKTYAHLFDDKVMKQLKRRRYTGWGRLSRKLINGIRDKQSGKTILDFLKSDGFANRNFMQLIHDDSLTFKEDIQKAQVSGQGDSLHEHIANLAGSPAIKKGILQTVKVVDELVKVMGRHKPENIVIEMARENQTTQKGQKNSRERMKRIEEGIKELGSQILKEHPVENTQLQNEKLYLYYLQNGRDMYVDQELDINRLSDYDVDAIVPQSFLKDDSIDNKVLTRSDKNRGKSDNVPSEEVVKKMKNYWRQLLNAKLITQRKFDNLTKAERGGLSELDKAGFIKRQLVETRQITKHVAQILDSRMNTKYDENDKLIREVKVITLKSKLVSDFRKDFQFYKVREINNYHHAHDAYLNAVVGTALIKKYPKLESEFVYGDYKVYDVRKMIAKSEQEIGKATAKYFFYSNIMNFFKTEITLANGEIRKRPLIETNGETGEIVWDKGRDFATVRKVLSMPQVNIVKKTEVQTGGFSKESILPKRNSDKLIARKKDWDPKKYGGFDSPTVAYSVLVVAKVEKGKSKKLKSVKELLGITIMERSSFEKNPIDFLEAKGYKEVKKDLIIKLPKYSLFELENGRKRMLASAGELQKGNELALPSKYVNFLYLASHYEKLKGSPEDNEQKQLFVEQHKHYLDEIIEQISEFSKRVILADANLDKVLSAYNKHRDKPIREQAENIIHLFTLTNLGAPAAFKYFDTTIDRKRYTSTKEVLDATLIHQSITGLYETRIDLSQLGGDSGGSKRTADGSEFEPKKKRKV

SEQ ID NO: 151-152 - skipped (2 entries)

SEQ ID NO: 153 - protein, 1367 aa, Streptococcus pyogenes; identical to SEQ ID NO: 55

SEQ ID NO: 154 - protein, 2529 aa, synthetic construct
  REGION 1..2529: note = Synthetic
MKRTADGSEFESPKKKRKVDKKYSIGLDIGTNSVGWAVITDEYKVPSKKFKVLGNTDRHSIKKNLIGALLFDSGETAEATRLKRTARRRYTRRKNRICYLQEIFSNEMAKVDDSFFHRLEESFLVEEDKKHERHPIFGNIVDEVAYHEKYPTIYHLRKKLVDSTDKADLRLIYLALAHMIKFRGHFLIEGDLNPDNSDVDKLFIQLVQTYNQLFEENPINASGVDAKAILSARLSKSRRLENLIAQLPGEKKNGLFGNLIALSLGLTPNFKSNFDLAEDAKLQLSKDTYDDDLDNLLAQIGDQYADLFLAAKNLSDAILLSDILRVNTEITKAPLSASMIKRYDEHHQDLTLLKALVRQQLPEKYKEIFFDQSKNGYAGYIDGGASQEEFYKFIKPILEKMDGTEELLVKLNREDLLRKQRTFDNGSIPHQIHLGELHAILRRQEDFYPFLKDNREKIEKILTFRIPYYVGPLARGNSRFAWMTRKSEETITPWNFEEVVDKGASAQSFIERMTNFDKNLPNEKVLPKHSLLYEYFTVYNELTKVKYVTEGMRKPAFLSGEQKKAIVDLLFKTNRKVTVKQLKEDYFKKIECFDSVEISGVEDRFNASLGTYHDLLKIIKDKDFLDNEENEDILEDIVLTLTLFEDREMIEERLKTYAHLFDDKVMKQLKRRRYTGWGRLSRKLINGIRDKQSGKTILDFLKSDGFANRNFMQLIHDDSLTFKEDIQKAQVSGQGDSLHEHIANLAGSPAIKKGILQTVKVVDELVKVMGRHKPENIVIEMARENQTTQKGQKNSRERMKRIEEGIKELGSQILKEHPVENTQLQNEKLYLYYLQNGRDMYVDQELDINRLSDYDVDAIVPQSFLKDDSIDNKVLTRSDKNRGKSDNVPSEEVVKKMKNYWRQLLNAKLITQRKFDNLTKAERGGLSELDKAGFIKRQLVETRQITKHVAQILDSRMNTKYDENDKLIREVKVITLKSKLVSDFRKDFQFYKVREINNYHHAHDAYLNAVVGTALIKKYPKLESEFVYGDYKVYDVRKMIAKSEQEIGKATAKYFFYSNIMNFFKTEITLANGEIRKRPLIETNGETGEIVWDKGRDFATVRKVLSMPQVNIVKKTEVQTGGFSKESILPKRNSDKLIARKKDWDPKKYGGFDSPTVAYSVLVVAKVEKGKSKKLKSVKELLGITIMERSSFEKNPIDFLEAKGYKEVKKDLIIKLPKYSLFELENGRKRMLASAGELQKGNELALPSKYVNFLYLASHYEKLKGSPEDNEQKQLFVEQHKHYLDEIIEQISEFSKRVILADANLDKVLSAYNKHRDKPIREQAENIIHLFTLTNLGAPAAFKYFDTTIDRKRYTSTKEVLDATLIHQSITGLYETRIDLSQLGGDSGGSSGGSSGSETPGTSESATPESSGGSSGGSSGIQGLAKLIADVAPSAIRENDIKSYFGRKVAIDASMSIYQFLIAVRQGGDVLQNEEGETTSHLMGMFYRTIRMMENGIKPVYVFDGKPPQLKSGELAKRSERRAEAEKQLQQAQAAGAEQEVEKFTKRLVKVTKQHNDECKHLLSLMGIPYLDAPSEAEASCAALVKAGKVYAAATEDMDCLTFGSPVLMRHLTASEAKKLPIQEFHLSRILQELGLNQEQFVDLCILLGSDYCESIRGIGPKRAVDLIQKHKSIEEIVRRLDPNKYPVPENWLHKEAHQLFLEPEVLDPESVELKWSEPNEEELIKFMCGEKQFSEERIRSGVKRLSKSRQGSTQGRLDDFFKVTGSLSSAKRKEPEPKGSTKKKAKTGAAGKFKRGKSGGSSGGSSGSETPGTSESATPESSGGSSGGSSTLNIEDEYRLHETSKEPDVSLGSTWLSDFPQAWAETGGMGLAVRQAPLIIPLKATSTPVSIKQYPMSQEARLGIKPHIQRLLDQGILVPCQSPWNTPLLPVKKPGTNDYRPVQDLREVNKRVEDIHPTVPNPYNLLSGLPPSHQWYTVLDLKDAFFCLRLHPTSQPLFAFEWRDPEMGISGQLTWTRLPQGFKNSPTLFNEALHRDLADFRIQHPDLILLQYVDDLLLAATSELDCQQGTRALLQTLGNLGYRASAKKAQICQKQVKYLGYLLKEGQRWLTEARKETVMGQPTPKTPRQLREFLGKAGFCRLFIPGFAEMAAPLYPLTKPGTLFNWGPDQQKAYQEIKQALLTAPALGLPDLTKPFELFVDEKQGYAKGVLTQKLGPWRRPVAYLSKKLDPVAAGWPPCLRMVAAIAVLTKDAGKLTMGQPLVILAPHAVEALVKQPPDRWLSNARMTHYQALLLDTDRVQFGPVVALNPATLLPLPEEGLQHNCLDILAEAHGTRPDLTDQPLPDADHTWYTDGSSLLQEGQRKAGAAVTTETEVIWAKALPAGTSAQRAELIALTQALKMAEGKKLNVYTDSRYAFATAHIHGEIYRRRGWLTSEGKEIKNKDEILALLKALFLPKRLSIIHCPGHQKGHSAEARGNRMADQAARKAAITETPDTSTLLIENSSPSGGSKRTADGSEFEPKKKRKV

SEQ ID NO: 155-156 - skipped (2 entries)

SEQ ID NO: 157 - protein, 1367 aa, Streptococcus pyogenes; identical to SEQ ID NO: 55

SEQ ID NO: 158 - skipped

SEQ ID NO: 159 - protein, 677 aa, synthetic construct; identical to SEQ ID NO: 122
  REGION 1..677: note = Synthetic

SEQ ID NO: 160 - skipped

SEQ ID NO: 161 - protein, 379 aa, synthetic construct
  REGION 1..379: note = Synthetic
GIQGLAKLIADVAPSAIRENDIKSYFGRKVAIDASMSIYQFLIAVRQGGDVLQNEEGETTSHLMGMFYRTIRMMENGIKPVYVFDGKPPQLKSGELAKRSERRAEAEKQLQQAQAAGAEQEVEKFTKRLVKVTKQHNDECKHLLSLMGIPYLDAPSEAEASCAALVKAGKVYAAATEDMDCLTFGSPVLMRHLTASEAKKLPIQEFHLSRILQELGLNQEQFVDLCILLGSDYCESIRGIGPKRAVDLIQKHKSIEEIVRRLDPNKYPVPENWLHKEAHQLFLEPEVLDPESVELKWSEPNEEELIKFMCGEKQFSEERIRSGVKRLSKSRQGSTQGRLDDFFKVTGSLSSAKRKEPEPKGSTKKKAKTGAAGKFKRGK

SEQ ID NO: 162 - protein, 1803 aa, synthetic construct
  REGION 1..1803: note = Synthetic
MKRTADGSEFESPKKKRKVGKRNYILGLDIGITSVGYGIIDYETRDVIDAGVRLFKEANVENNEGRRSKRGARRLKRRRRHRIQRVKKLLFDYNLLTDHSELSGINPYEARVKGLSQKLSEEEFSAALLHLAKRRGVHNVNEVEEDTGNELSTKEQISRNSKALEEKYVAELQLERLKKDGEVRGSINRFKTSDYVKEAKQLLKVQKAYHQLDQSFIDTYIDLLETRRTYYEGPGEGSPFGWKDIKEWYEMLMGHCTYFPEELRSVKYAYNADLYNALNDLNNLVITRDENEKLEYYEKFQIIENVFKQKKKPTLKQIAKEILVNEEDIKGYRVTSTGKPEFTNLKVYHDIKDITARKEIIENAELLDQIAKILTIYQSSEDIQEELTNLNSELTQEEIEQISNLKGYTGTHNLSLKAINLILDELWHTNDNQIAIFNRLKLVPKKVDLSQQKEIPTTLVDDFILSPVVKRSFIQSIKVINAIIKKYGLPNDIIIELAREKNSKDAQKMINEMQKRNRQTNERIEEIIRTTGKENAKYLIEKIKLHDMQEGKCLYSLEAIPLEDLLNNPFNYEVDHIIPRSVSFDNSFNNKVLVKQEEASKKGNRTPFQYLSSSDSKISYETFKKHILNLAKGKGRISKTKKEYLLEERDINRFSVQKDFINRNLVDTRYATRGLMNLLRSYFRVNNLDVKVKSINGGFTSFLRRKWKFKKERNKGYKHHAEDALIIANADFIFKEWKKLDKAKKVMENQMFEEKQAESMPEIETEQEYKEIFITPHQIKHIKDFKDYKYSHRVDKKPNRELINDTLYSTRKDDKGNTLIVNNLNGLYDKDNDKLKKLINKSPEKLLMYHHDPQTYQKLKLIMEQYGDEKNPLYKYYEETGNYLTKYSKKDNGPVIKKIKYYGNKLNAHLDITDDYPNSRNKVVKLSLKPYRFDVYLDNGVYKFVTVKNLDVIKKENYYEVNSKCYEEAKKLKKISNQAEFIASFYNNDLIKINGELYRVIGVNNDLLNRIEVNMIDITYREYLENMNDKRPPRIIKTIASKTQSIKKYSTDILGNLYEVKSKKHPQIIKKGSGGSSGGSSGSETPGTSESATPESSGGSSGGSSTLNIEDEYRLHETSKEPDVSLGSTWLSDFPQAWAETGGMGLAVRQAPLIIPLKATSTPVSIKQYPMSQEARLGIKPHIQRLLDQGILVPCQSPWNTPLLPVKKPGTNDYRPVQDLREVNKRVEDIHPTVPNPYNLLSGLPPSHQWYTVLDLKDAFFCLRLHPTSQPLFAFEWRDPEMGISGQLTWTRLPQGFKNSPTLFDEALHRDLADFRIQHPDLILLQYVDDLLLAATSELDCQQGTRALLQTLGNLGYRASAKKAQICQKQVKYLGYLLKEGQRWLTEARKETVMGQPTPKTPRQLREFLGTAGFCRLWIPGFAEMAAPLYPLTKTGTLFNWGPDQQKAYQEIKQALLTAPALGLPDLTKPFELFVDEKQGYAKGVLTQKLGPWRRPVAYLSKKLDPVAAGWPPCLRMVAAIAVLTKDAGKLTMGQPLVILAPHAVEALVKQPPDRWLSNARMTHYQALLLDTDRVQFGPVVALNPATLLPLPEEGLQHNCLDILAEAHGTRPDLTDQPLPDADHTWYTDGSSLLQEGQRKAGAAVTTETEVIWAKALPAGTSAQRAELIALTQALKMAEGKKLNVYTDSRYAFATAHIHGEIYRRRGLLTSEGKEIKNKDEILALLKALFLPKRLSIIHCPGHQKGHSAEARGNRMADQAARKAAITETPDTSTLLIENSSPSGGSKRTADGSEFEPKKKRKV

SEQ ID NO: 163 - protein, 2117 aa, synthetic construct
  REGION 1..2117: note = Synthetic
MKRTADGSEFESPKKKRKVDKKYSIGLDIGTNSVGWAVITDEYKVPSKKFKVLGNTDRHSIKKNLIGALLFDSGETAEATRLKRTARRRYTRRKNRICYLQEIFSNEMAKVDDSFFHRLEESFLVEEDKKHERHPIFGNIVDEVAYHEKYPTIYHLRKKLVDSTDKADLRLIYLALAHMIKFRGHFLIEGDLNPDNSDVDKLFIQLVQTYNQLFEENPINASGVDAKAILSARLSKSRRLENLIAQLPGEKKNGLFGNLIALSLGLTPNFKSNFDLAEDAKLQLSKDTYDDDLDNLLAQIGDQYADLFLAAKNLSDAILLSDILRVNTEITKAPLSASMIKRYDEHHQDLTLLKALVRQQLPEKYKEIFFDQSKNGYAGYIDGGASQEEFYKFIKPILEKMDGTEELLVKLNREDLLRKQRTFDNGSIPHQIHLGELHAILRRQEDFYPFLKDNREKIEKILTFRIPYYVGPLARGNSRFAWMTRKSEETITPWNFEEVVDKGASAQSFIERMTNFDKNLPNEKVLPKHSLLYEYFTVYNELTKVKYVTEGMRKPAFLSGEQKKAIVDLLFKTNRKVTVKQLKEDYFKKIECFDSVEISGVEDRFNASLGTYHDLLKIIKDKDFLDNEENEDILEDIVLTLTLFEDREMIEERLKTYAHLFDDKVMKQLKRRRYTGWGRLSRKLINGIRDKQSGKTILDFLKSDGFANRNFMQLIHDDSLTFKEDIQKAQVSGQGDSLHEHIANLAGSPAIKKGILQTVKVVDELVKVMGRHKPENIVIEMARENQTTQKGQKNSRERMKRIEEGIKELGSQILKEHPVENTQLQNEKLYLYYLQNGRDMYVDQELDINRLSDYDVDAIVPQSFLKDDSIDNKVLTRSDKNRGKSDNVPSEEVVKKMKNYWRQLLNAKLITQRKFDNLTKAERGGLSELDKAGFIKRQLVETRQITKHVAQILDSRMNTKYDENDKLIREVKVITLKSKLVSDFRKDFQFYKVREINNYHHAHDAYLNAVVGTALIKKYPKLESEFVYGDYKVYDVRKMIAKSEQEIGKATAKYFFYSNIMNFFKTEITLANGEIRKRPLIETNGETGEIVWDKGRDFATVRKVLSMPQVNIVKKTEVQTGGFSKESILPKRNSDKLIARKKDWDPKKYGGFVSPTVAYSVLVVAKVEKGKSKKLKSVKELLGITIMERSSFEKNPIDFLEAKGYKEVKKDLIIKLPKYSLFELENGRKRMLASARELQKGNELALPSKYVNFLYLASHYEKLKGSPEDNEQKQLFVEQHKHYLDEIIEQISEFSKRVILADANLDKVLSAYNKHRDKPIREQAENIIHLFTLTNLGAPAAFKYFDTTIDRKQYRSTKEVLDATLIHQSITGLYETRIDLSQLGGDSGGSSGGSSGSETPGTSESATPESSGGSSGGSSTLNIEDEYRLHETSKEPDVSLGSTWLSDFPQAWAETGGMGLAVRQAPLIIPLKATSTPVSIKQYPMSQEARLGIKPHIQRLLDQGILVPCQSPWNTPLLPVKKPGTNDYRPVQDLREVNKRVEDIHPTVPNPYNLLSGLPPSHQWYTVLDLKDAFFCLRLHPTSQPLFAFEWRDPEMGISGQLTWTRLPQGFKNSPTLFNEALHRDLADFRIQHPDLILLQYVDDLLLAATSELDCQQGTRALLQTLGNLGYRASAKKAQICQKQVKYLGYLLKEGQRWLTEARKETVMGQPTPKTPRQLREFLGKAGFCRLFIPGFAEMAAPLYPLTKPGTLFNWGPDQQKAYQEIKQALLTAPALGLPDLTKPFELFVDEKQGYAKGVLTQKLGPWRRPVAYLSKKLDPVAAGWPPCLRMVAAIAVLTKDAGKLTMGQPLVILAPHAVEALVKQPPDRWLSNARMTHYQALLLDTDRVQFGPVVALNPATLLPLPEEGLQHNCLDILAEAHGTRPDLTDQPLPDADHTWYTDGSSLLQEGQRKAGAAVTTETEVIWAKALPAGTSAQRAELIALTQALKMAEGKKLNVYTDSRYAFATAHIHGEIYRRRGWLTSEGKEIKNKDEILALLKALFLPKRLSIIHCPGHQKGHSAEARGNRMADQAARKAAITETPDTSTLLIENSSPSGGSKRTADGSEFEPKKKRKV

SEQ ID NO: 164 - protein, 2117 aa, unidentified
  REGION 1..2117: note = moloney murine leukemia virus
MKRTADGSEFESPKKKRKVDKKYSIGLDIGTNSVGWAVITDEYKVPSKKFKVLGNTDRHSIKKNLIGALLFDSGETAEATRLKRTARRRYTRRKNRICYLQEIFSNEMAKVDDSFFHRLEESFLVEEDKKHERHPIFGNIVDEVAYHEKYPTIYHLRKKLVDSTDKADLRLIYLALAHMIKFRGHFLIEGDLNPDNSDVDKLFIQLVQTYNQLFEENPINASGVDAKAILSARLSKSRRLENLIAQLPGEKKNGLFGNLIALSLGLTPNFKSNFDLAEDAKLQLSKDTYDDDLDNLLAQIGDQYADLFLAAKNLSDAILLSDILRVNTEITKAPLSASMIKRYDEHHQDLTLLKALVRQQLPEKYKEIFFDQSKNGYAGYIDGGASQEEFYKFIKPILEKMDGTEELLVKLNREDLLRKQRTFDNGSIPHQIHLGELHAILRRQEDFYPFLKDNREKIEKILTFRIPYYVGPLARGNSRFAWMTRKSEETITPWNFEEVVDKGASAQSFIERMTNFDKNLPNEKVLPKHSLLYEYFTVYNELTKVKYVTEGMRKPAFLSGEQKKAIVDLLFKTNRKVTVKQLKEDYFKKIECFDSVEISGVEDRFNASLGTYHDLLKIIKDKDFLDNEENEDILEDIVLTLTLFEDREMIEERLKTYAHLFDDKVMKQLKRRRYTGWGRLSRKLINGIRDKQSGKTILDFLKSDGFANRNFMQLIHDDSLTFKEDIQKAQVSGQGDSLHEHIANLAGSPAIKKGILQTVKVVDELVKVMGRHKPENIVIEMARENQTTQKGQKNSRERMKRIEEGIKELGSQILKEHPVENTQLQNEKLYLYYLQNGRDMYVDQELDINRLSDYDVDAIVPQSFLKDDSIDNKVLTRSDKNRGKSDNVPSEEVVKKMKNYWRQLLNAKLITQRKFDNLTKAERGGLSELDKAGFIKRQLVETRQITKHVAQILDSRMNTKYDENDKLIREVKVITLKSKLVSDFRKDFQFYKVREINNYHHAHDAYLNAVVGTALIKKYPKLESEFVYGDYKVYDVRKMIAKSEQEIGKATAKYFFYSNIMNFFKTEITLANGEIRKRPLIETNGETGEIVWDKGRDFATVRKVLSMPQVNIVKKTEVQTGGFSKESILPKRNSDKLIARKKDWDPKKYGGFVSPTVAYSVLVVAKVEKGKSKKLKSVKELLGITIMERSSFEKNPIDFLEAKGYKEVKKDLIIKLPKYSLFELENGRKRMLASARELQKGNELALPSKYVNFLYLASHYEKLKGSPEDNEQKQLFVEQHKHYLDEIIEQISEFSKRVILADANLDKVLSAYNKHRDKPIREQAENIIHLFTLTNLGAPAAFKYFDTTIDRKEYRSTKEVLDATLIHQSITGLYETRIDLSQLGGDSGGSSGGSSGSETPGTSESATPESSGGSSGGSSTLNIEDEYRLHETSKEPDVSLGSTWLSDFPQAWAETGGMGLAVRQAPLIIPLKATSTPVSIKQYPMSQEARLGIKPHIQRLLDQGILVPCQSPWNTPLLPVKKPGTNDYRPVQDLREVNKRVEDIHPTVPNPYNLLSGLPPSHQWYTVLDLKDAFFCLRLHPTSQPLFAFEWRDPEMGISGQLTWTRLPQGFKNSPTLFNEALHRDLADFRIQHPDLILLQYVDDLLLAATSELDCQQGTRALLQTLGNLGYRASAKKAQICQKQVKYLGYLLKEGQRWLTEARKETVMGQPTPKTPRQLREFLGKAGFCRLFIPGFAEMAAPLYPLTKPGTLFNWGPDQQKAYQEIKQALLTAPALGLPDLTKPFELFVDEKQGYAKGVLTQKLGPWRRPVAYLSKKLDPVAAGWPPCLRMVAAIAVLTKDAGKLTMGQPLVILAPHAVEALVKQPPDRWLSNARMTHYQALLLDTDRVQFGPVVALNPATLLPLPEEGLQHNCLDILAEAHGTRPDLTDQPLPDADHTWYTDGSSLLQEGQRKAGAAVTTETEVIWAKALPAGTSAQRAELIALTQALKMAEGKKLNVYTDSRYAFATAHIHGEIYRRRGWLTSEGKEIKNKDEILALLKALFLPKRLSIIHCPGHQKGHSAEARGNRMADQAARKAAITETPDTSTLLIENSSPSGGSKRTADGSEFEPKKKRKV

SEQ ID NO: 165 - protein, 150 aa, synthetic construct
  REGION 1..150: note = Synthetic
  REGION 6..150: note = misc_feature - may be absent
GGGGSGGGGSGGGGSGGGGSGGGGSGGGGSGGGGSGGGGSGGGGSGGGGSGGGGSGGGGSGGGGSGGGGSGGGGSGGGGSGGGGSGGGGSGGGGSGGGGSGGGGSGGGGSGGGGSGGGGSGGGGSGGGGSGGGGSGGGGSGGGGSGGGGS

SEQ ID NO: 166 - protein, 30 aa, synthetic construct
  REGION 1..30: note = Synthetic
  REGION 2..30: note = misc_feature - may be absent
GGGGGGGGGGGGGGGGGGGGGGGGGGGGGG

SEQ ID NO: 167 - protein, 150 aa, synthetic construct
  REGION 1..150: note = Synthetic
  REGION 6..150: note = misc_feature - may be absent
EAAAKEAAAKEAAAKEAAAKEAAAKEAAAKEAAAKEAAAKEAAAKEAAAKEAAAKEAAAKEAAAKEAAAKEAAAKEAAAKEAAAKEAAAKEAAAKEAAAKEAAAKEAAAKEAAAKEAAAKEAAAKEAAAKEAAAKEAAAKEAAAKEAAAK

SEQ ID NO: 168 - protein, 90 aa, synthetic construct
  REGION 1..90: note = Synthetic
  REGION 4..90: note = misc_feature - may be absent
GGSGGSGGSGGSGGSGGSGGSGGSGGSGGSGGSGGSGGSGGSGGSGGSGGSGGSGGSGGSGGSGGSGGSGGSGGSGGSGGSGGSGGSGGS

SEQ ID NO: 169 - protein, 120 aa, synthetic construct
  REGION 1..120: note = Synthetic
  REGION 5..120: note = misc_feature - may be absent
SGGSSGGSSGGSSGGSSGGSSGGSSGGSSGGSSGGSSGGSSGGSSGGSSGGSSGGSSGGSSGGSSGGSSGGSSGGSSGGSSGGSSGGSSGGSSGGSSGGSSGGSSGGSSGGSSGGSSGGS

SEQ ID NO: 170 - protein, 60 aa, synthetic construct
  REGION 1..60: note = Synthetic
  SITE 1: note = misc_feature - Xaa can be any naturally occurring amino acid
  SITE 3: note = misc_feature - Xaa can be any naturally occurring amino acid
  REGION 3..60: note = misc_feature - may be absent
  SITE 5: note = misc_feature - Xaa can be any naturally occurring amino acid
  SITE 7: note = misc_feature - Xaa can be any naturally occurring amino acid
  SITE 9: note = misc_feature - Xaa can be any naturally occurring amino acid
  SITE 11: note = misc_feature - Xaa can be any naturally occurring amino acid
  SITE 13: note = misc_feature - Xaa can be any naturally occurring amino acid
  SITE 15: note = misc_feature - Xaa can be any naturally occurring amino acid
  SITE 17: note = misc_feature - Xaa can be any naturally occurring amino acid
  SITE 19: note = misc_feature - Xaa can be any naturally occurring amino acid
  SITE 21: note = misc_feature - Xaa can be any naturally occurring amino acid
  SITE 23: note = misc_feature - Xaa can be any naturally occurring amino acid
  SITE 25: note = misc_feature - Xaa can be any naturally occurring amino acid
  SITE 27: note = misc_feature - Xaa can be any naturally occurring amino acid
  SITE 29: note = misc_feature - Xaa can be any naturally occurring amino acid
  SITE 31: note = misc_feature - Xaa can be any naturally occurring amino acid
  SITE 33: note = misc_feature - Xaa can be any naturally occurring amino acid
  SITE 35: note = misc_feature - Xaa can be any naturally occurring amino acid
  SITE 37: note = misc_feature - Xaa can be any naturally occurring amino acid
  SITE 39: note = misc_feature - Xaa can be any naturally occurring amino acid
  SITE 41: note = misc_feature - Xaa can be any naturally occurring amino acid
  SITE 43: note = misc_feature - Xaa can be any naturally occurring amino acid
  SITE 45: note = misc_feature - Xaa can be any naturally occurring amino acid
  SITE 47: note = misc_feature - Xaa can be any naturally occurring amino acid
  SITE 49: note = misc_feature - Xaa can be any naturally occurring amino acid
  SITE 51: note = misc_feature - Xaa can be any naturally occurring amino acid
  SITE 53: note = misc_feature - Xaa can be any naturally occurring amino acid
  SITE 55: note = misc_feature - Xaa can be any naturally occurring amino acid
  SITE 57: note = misc_feature - Xaa can be any naturally occurring amino acid
  SITE 59: note = misc_feature - Xaa can be any naturally occurring amino acid
XPXPXPXPXPXPXPXPXPXPXPXPXPXPXPXPXPXPXPXPXPXPXPXPXPXPXPXPXPXP

SEQ ID NO: 171 - protein, 16 aa, synthetic construct
  REGION 1..16: note = Synthetic
SGSETPGTSESATPES

SEQ ID NO: 172 - protein, 32 aa, synthetic construct
  REGION 1..32: note = Synthetic
SGGSSGGSSGSETPGTSESATPESSGGSSGGS

SEQ ID NO: 173 - protein, 10 aa, synthetic construct
  REGION 1..10: note = Synthetic
SGGSGGSGGS

SEQ ID NO: 174 - protein, 4 aa, synthetic construct
  REGION 1..4: note = Synthetic
SGGS

SEQ ID NO: 175 - protein, 60 aa, synthetic construct
  REGION 1..60: note = Synthetic
SGGSSGGSSGSETPGTSESATPESAGSYPYDVPDYAGSAAPAAKKKKLDGSGSGGSSGGS

SEQ ID NO: 176 - protein, 21 aa, synthetic construct
  REGION 1..21: note = Synthetic
GGSGGSGGSGGSGGSGGSGGS

SEQ ID NO: 177 - DNA, 17 bp, synthetic construct
  misc_feature 1..17: note = Synthetic
  source 1..17: mol_type = other DNA
cggtggaccgatgatct

SEQ ID NO: 178 - DNA, 17 bp, synthetic construct
  misc_feature 1..17: note = Synthetic
  source 1..17: mol_type = other DNA
gccacctggctactaga

SEQ ID NO: 179 - DNA, 17 bp, synthetic construct
  misc_feature 1..17: note = Synthetic
  source 1..17: mol_type = other DNA
agatcatcggtccaccg

SEQ ID NO: 180 - DNA, 17 bp, synthetic construct
  misc_feature 1..17: note = Synthetic
  source 1..17: mol_type = other DNA
tctagtagccaggtggc

SEQ ID NO: 181 - DNA, 136 bp, synthetic construct
  misc_feature 1..136: note = Synthetic
  source 1..136: mol_type = other DNA
ggcccagactgagcacgtgagttttagagctagaaatagcaagttaaaataaggctagtccgttatcaacttgaaaaagtggcaccgagtcggtgctctgccatcacggtggaccgatgatctcgtgctcagtctg

SEQ ID NO: 182 - DNA, 154 bp, synthetic construct
  misc_feature 1..154: note = Synthetic
  source 1..154: mol_type = other DNA
ggcactgcggctggaggtgggttttagagctagaaatagcaagttaaaataaggctagtccgttatcaacttgaaaaagtggcaccgagtcggtgcacacagcaccagagtctccgctttaacccccagccacctggctactagacctccagcc

SEQ ID NO: 183 - DNA, 141 bp, synthetic construct
  misc_feature 1..141: note = Synthetic
  source 1..141: mol_type = other DNA
gcatggtgcacctgactcctggttttagagctagaaatagcaagttaaaataaggctagtccgttatcaacttgaaaaagtggcaccgagtcggtgcagacttctcttcaggccacctggctactagagagtcaggtgcac

SEQ ID NO: 184-189 - skipped (6 entries)

SEQ ID NO: 190 - protein, 20 aa, synthetic construct
  REGION 1..20: note = Synthetic
AVKRPAATKKAGQAKKKKLD

SEQ ID NO: 191 - protein, 25 aa, synthetic construct
  REGION 1..25: note = Synthetic
MSRRRKANPTKLSENAKKLAKEVEN

SEQ ID NO: 192 - protein, 9 aa, synthetic construct
  REGION 1..9: note = Synthetic
PAAKRVKLD

SEQ ID NO: 193 - protein, 9 aa, synthetic construct
  REGION 1..9: note = Synthetic
KLKIKRPVK

SEQ ID NO: 194 - protein, 8 aa, synthetic construct
  REGION 1..8: note = Synthetic
VSRKRPRP

SEQ ID NO: 195 - protein, 10 aa, synthetic construct
  REGION 1..10: note = Synthetic
EGAPPAKRAR

SEQ ID NO: 196 - protein, 12 aa, synthetic construct
  REGION 1..12: note = Synthetic
PPQPKKKPLDGE

SEQ ID NO: 197 - skipped

SEQ ID NO: 198 - protein, 380 aa, Homo sapiens; identical to SEQ ID NO: 7

SEQ ID NO: 199 - protein, 380 aa, synthetic construct
  REGION 1..380: note = Synthetic
MGIQGLAKLIADVAPSAIRENDIKSYFGRKVAIDASMSIYQFLIAVRQGGDVLQNEEGETTSHLMGMFYRTIRMMENGIKPVYVFDGKPPQLKSGELAKRSERRAEAEKQLQQAQAAGAEQEVEKFTKRLVKVTKQHNDECKHLLSLMGIPYLDAPSEAEASCAALVRAGKVYAAATEDMDCLTFGSPVLMRHLTASEAKKLPIQEFHLSRILQELGLNQEQFVDLCILLGSDYCESIRGIGPKRAVDLIQKHKSIEEIVRRLDPNKYPVPENWLHKEAHQLFLEPEVLDPESVELKWSEPNEEELIKFMCGEKQFSEERIRSGVKRLSKSRQGSTQGRLDDFFKVTGSLSSAKRKEPEPKGSTKKKAKTGAAGKFKRGK

SEQ ID NO: 200 - protein, 380 aa, synthetic construct
  REGION 1..380: note = Synthetic
MGIQGLAKLIADVAPSAIRENDIKSYFGRKVAIDASMSIYQFLIAVRQGGDVLQNEEGETTSHLMGMFYRTIRMMENGIKPVYVFDGKPPQLKSGELAKRSERRAEAEKQLQQAQAAGAEQEVEKFTKRLVKVTKQHNDECKHLLSLMGIPYLDAPSEAEASCAALVKAGKVYAAATEDMDCLTFGAPVLMRHLTASEAKKLPIQEFHLSRILQELGLNQEQFVDLCILLGSDYCESIRGIGPKRAVDLIQKHKSIEEIVRRLDPNKYPVPENWLHKEAHQLFLEPEVLDPESVELKWSEPNEEELIKFMCGEKQFSEERIRSGVKRLSKSRQGSTQGRLDDFFKVTGSLSSAKRKEPEPKGSTKKKAKTGAAGKFKRGK

SEQ ID NO: 201 - protein, 380 aa, synthetic construct
  REGION 1..380: note = Synthetic
MGIQGLAKLIADVAPSAIRENDIKSYFGRKVAIDASMSIYQFLIAVRQGGDVLQNEEGETTSHLMGMFYRTIRMMENGIKPVYVFDGKPPQLKSGELAKRSERRAEAEKQLQQAQAAGAEQEVEKFTKRLVKVTKQHNDECKHLLSLMGIPYLDAPSEAEASCAALVKAGKVYAAATEDMDCLTFGSPVLMRHLTASEAKKLPIQEFHLSRILQELGLNQEQFVDLCILLGSDYCESIRGIGPKRAVDLIQKHKSIEEIVRRLDPNKYPVPENWLHKEAHQLFLEPEVLDPESVELKWSEPNEEELIKFMCGEKQFSEERIRSGVKRLSKSRQGSTQGRLDDFFKVTGSLSSARRKEPEPKGSTKKKAKTGAAGKFKRGK

SEQ ID NO: 202 - protein, 908 aa, synthetic construct
  REGION 1..908: note = Synthetic
MGVNDLWQILEPVKQHIPLRNLGGKTIAVDLSLWVCEAQTVKKMMGSVMKPHLRNLFFRISYLTQMDVKLVFVMEGEPPKLKADVISKRNQSRYGSSGKSWSQKTGRSHFKSVLRECLHMLECLGIPWVQAAGEAEAMCAYLNAGGHVDGCLTNDGDTFLYGAQTVYRNFTMNTKDPHVDCYTMSSIKSKLGLDRDALVGLAILLGCDYLPKGVPGVGKEQALKLIQILKGQSLLQRFNRWNETSCNSSPQLLVTKKLAHCSVCSHPGSPKDHERNGCRLCKSDKYCEPHDYEYCCPCEWHRTEHDRQLSEVENNIKKKACCCEGFPFHEVIQEFLLNKDKLVKVIRYQRPDLLLFQRFTLEKMEWPNHYACEKLLVLLTHYDMIERKLGSRNSNQLQPIRIVKTRIRNGVHCFEIEWEKPEHYAMEDKQHGEFALLTIEEESLFEAAYPEIVAVYQKQKLEIKGKKQKRIKPKENNLPEPDEVMSFQSHMTLKPTCEIFHKQNSKLNSGISPDPTLPQESISASLNSLLLPKNTPCLNAQEQFMSSLRPLAIQQIKAVSKSLISESSQPNTSSHNISVIADLHLSTIDWEGTSFSNSPAIQRNTFSHDLKSEVESELSAIPDGFENIPEQLSCESERYTANIKKVLDEDSDGISPEEHLLSGITDLCLQDLPLKERIFTKLSYPQDNLQPDVNLKTLSILSVKESCIANSGSDCTSHLSKDLPGIPLQNESRDSKILKGDQLLQEDYKVNTSVPYSVSNTVVKTCNVRPPNTALDHSRKVDMQTTRKILMKKSVCLDRHSSDEQSAPVFGKAKYTTQRMKHSSQKHNSSHFKESGHNKLSSPKIHIKETEQCVRSYETAENEESCFPDSTKSSLSSLQCHKKENNSGTCLDSPLPLRQRLKLRFQST

SEQ ID NO: 203 - protein, 1186 aa, synthetic construct
  REGION 1..1186: note = Synthetic
MGVQGLWKLLECSGRQVSPEALEGKILAVDISIWLNQALKGVRDRHGNSIENPHLLTLFHRLCKLLFFRIRPIFVFDGDAPLLKKQTLVKRRQRKDLASSDSRKTTEKLLKTFLKRQAIKTAFRSKRDEALPSLTQVRRENDLYVLPPLQEEEKHSSEEEDEKEWQERMNQKQALQEEFFHNPQAIDIESEDFSSLPPEVKHEILTDMKEFTKRRRTLFEAMPEESDDFSQYQLKGLLKKNYLNQHIEHVQKEMNQQHSGHIRRQYEDEGGFLKEVESRRVVSEDTSHYILIKGIQAKTVAEVDSESLPSSSKMHGMSFDVKSSPCEKLKTEKEPDATPPSPRTLLAMQAALLGSSSEEELESENRRQARGRNAPAAVDEGSISPRTLSAIKRALDDDEDVKVCAGDDVQTGGPGAEEMRINSSTENSDEGLKVRDGKGIPFTATLASSSVNSAEEHVASTNEGREPTDSVPKEQMSLVHVGTEAFPISDESMIKDRKDRLPLESAVVRHSDAPGLPNGRELTPASPTCTNSVSKNETHAEVLEQQNELCPYESKFDSSLLSSDDETKCKPNSASEVIGPVSLQETSSIVSVPSEAVDNVENVVSFNAKEHENFLETIQEQQTTESAGQDLISIPKAVEPMEIDSEESESDGSFIEVQSVISDEELQAEFPETSKPPSEQGEEELVGTREGEAPAESESLLRDNSERDDVDGEPQEAEKDAEDSLHEWQDINLEELETLESNLLAQQNSLKAQKQQQERIAATVTGQMFLESQELLRLFGIPYIQAPMEAEAQCAILDLTDQTSGTITDDSDIWLFGARHVYRNFFNKNKFVEYYQYVDFHNQLGLDRNKLINLAYLLGSDYTEGIPTVGCVTAMEILNEFPGHGLEPLLKFSEWWHEAQKNPKIRPNPHDTKVKKKLRTLQLTPGFPNPAVAEAYLKPVVDDSKGSFLWGKPDLDKIREFCQRYFGWNRTKTDESLFPVLKQLDAQQTQLRIDSFFRLAQQEKEDAKRIKSQRLNRAVTCMLRKEKEAAASEIEAVSVAMEKEFELLDKAKRKTQKRGITNTLEESSSLKRKRLSDSKRKNTCGGFLGETCLSESSDGSSSEDAESSSLMNVQRRTAAKEPKTSASDSQNSVKEAPVKNGGATTSSSSDSDDDGGKEKMVLVTARSVFGKKRRKLRRARGRKRKT

SEQ ID NO: 204-211 - skipped (8 entries)

SEQ ID NO: 212 - protein, 25 aa, synthetic construct
  REGION 1..25: note = Synthetic
  SITE 21: note = Xaa can be any naturally occurring amino acid
  SITE 24: note = Xaa can be any naturally occurring amino acid
MMMMMMMMNNNNNNNNNNNNXGGXG

SEQ ID NO: 213 - protein, 17 aa, synthetic construct
  REGION 1..17: note = Synthetic
  SITE 13: note = Xaa can be any naturally occurring amino acid
  SITE 16: note = Xaa can be any naturally occurring amino acid
NNNNNNNNNNNNXGGXG

SEQ ID NO: 214 - protein, 25 aa, synthetic construct
  REGION 1..25: note = Synthetic
  SITE 21: note = Xaa can be any naturally occurring amino acid
  SITE 24: note = Xaa can be any naturally occurring amino acid
MMMMMMMMMNNNNNNNNNNNXGGXG

SEQ ID NO: 215 - protein, 16 aa, synthetic construct
  REGION 1..16: note = Synthetic
  SITE 12: note = Xaa can be any naturally occurring amino acid
  SITE 15: note = Xaa can be any naturally occurring amino acid
NNNNNNNNNNNXGGXG

SEQ ID NO: 216 - DNA, 125 bp, synthetic construct
  misc_feature 1..125: note = Synthetic
  misc_feature 1..8: note = n is a, c, g, or t
  source 1..125: mol_type = other DNA
nnnnnnnngtttttgtactctcaagatttagaaataaatcttgcagaagctacaaagataaggcttcatgccgaaatcaacaccctgtcattttatggcagggtgttttcgttatttaatttttt

SEQ ID NO: 217 - DNA, 121 bp, synthetic construct
  misc_feature 1..121: note = Synthetic
  misc_feature 1..18: note = n is a, c, g, or t
  source 1..121: mol_type = other DNA
nnnnnnnnnnnnnnnnnngtttttgtactctcagaaatgcagaagctacaaagataaggcttcatgccgaaatcaacaccctgtcattttatggcagggtgttttcgttatttaatttttt

SEQ ID NO: 218 - DNA, 109 bp, synthetic construct
  misc_feature 1..109: note = Synthetic
  misc_feature 1..20: note = n is a, c, g, or t
  source 1..109: mol_type = other DNA
nnnnnnnnnnnnnnnnnnnngtttttgtactctcagaaatgcagaagctacaaagataaggcttcatgccgaaatcaacaccctgtcattttatggcagggtgtttttt

SEQ ID NO: 219 - DNA, 102 bp, synthetic construct
  misc_feature 1..102: note = Synthetic
  misc_feature 1..20: note = n is a, c, g, or t
  source 1..102: mol_type = other DNA
nnnnnnnnnnnnnnnnnnnngttttagagctagaaatagcaagttaaaataaggctagtccgttatcaacttgaaaaagtggcaccgagtcggtgctttttt

SEQ ID NO: 220 - DNA, 88 bp, synthetic construct
  misc_feature 1..88: note = Synthetic
  misc_feature 1..20: note = n is a, c, g, or t
  source 1..88: mol_type = other DNA
nnnnnnnnnnnnnnnnnnnngttttagagctagaaatagcaagttaaaataaggctagtccgttatcaacttgaaaaagtgttttttt

SEQ ID NO: 221 - DNA, 76 bp, synthetic construct
  misc_feature 1..76: note = Synthetic
  misc_feature 1..20: note = n is a, c, g, or t
  source 1..76: mol_type = other DNA
nnnnnnnnnnnnnnnnnnnngttttagagctagaaatagcaagttaaaataaggctagtccgttatcatttttttt

SEQ ID NO: 222 - RNA, 82 nt, synthetic construct
  misc_feature 1..82: note = Synthetic
  source 1..82: mol_type = other RNA
gttttagagctagaaatagcaagttaaaataaaggctagtccgttatcaacttgaaaaagtggcaccgagtcggtgcttttt

SEQ ID NO: 223 - DNA, 905 bp, synthetic construct
  misc_feature 1..905: note = Synthetic
  source 1..905: mol_type = other DNA
tagttattaatagtaatcaattacggggtcattagttcatagcccatatatggagttccgcgttacataacttacggtaaatggcccgcctggctgaccgcccaacgacccccgcccattgacgtcaataatgacgtatgttcccatagtaacgccaatagggactttccattgacgtcaatgggtggagtatttacggtaaactgcccacttggcagtacatcaagtgtatcatatgccaagtacgccccctattgacgtcaatgacggtaaatggcccgcctggcattatgcccagtacatgaccttatgggactttcctacttggcagtacatctacgtattagtcatcgctattaccatggtgatgcggttttggcagtacatcaatgggcgtggatagcggtttgactcacggggatttccaagtctccaccccattgacgtcaatgggagtttgttttggcaccaaaatcaacgggactttccaaaatgtcgtaacaactccgccccattgacgcaaatgggcggtaggcgtgtacggtgggaggtctatataagcagagctggtttagtgaaccgtcagatcgttcactgccgtataggcagggcccagactgagcacgtgagttttagagctagaaatagcaagttaaaataaggctagtccgttatcaacttgaaaaagtgggaccgagtcggtcctctgccatcaaagcgtgctcagtctgttttagggtcatgaaggtttttcttttcctgagaaaacaacacgtattgttttctcaggttttgctttttggcctttttctagcttaaaaaaaaaaaaagcaaaagatgctggtggttggcactcctggtttccaggacggggttcaaatccctgcggcgtctttgctttgact

SEQ ID NO: 224 - DNA, 942 bp, synthetic construct
  misc_feature 1..942: note = Synthetic
  source 1..942: mol_type = other DNA
tagttattaatagtaatcaattacggggtcattagttcatagcccatatatggagttccgcgttacataacttacggtaaatggcccgcctggctgaccgcccaacgacccccgcccattgacgtcaataatgacgtatgttcccatagtaacgccaatagggactttccattgacgtcaatgggtggagtatttacggtaaactgcccacttggcagtacatcaagtgtatcatatgccaagtacgccccctattgacgtcaatgacggtaaatggcccgcctggcattatgcccagtacatgaccttatgggactttcctacttggcagtacatctacgtattagtcatcgctattaccatggtgatgcggttttggcagtacatcaatgggcgtggatagcggtttgactcacggggatttccaagtctccaccccattgacgtcaatgggagtttgttttggcaccaaaatcaacgggactttccaaaatgtcgtaacaactccgccccattgacgcaaatgggcggtaggcgtgtacggtgggaggtctatataagcagagctggtttagtgaaccgtcagatcgttcactgccgtataggcagggcccagactgagcacgtgagttttagagctagaaatagcaagttaaaataaggctagtccgttatcaacttgaaaaagtgggaccgagtcggtcctctgccatcaaagcgtgctcagtctgttttgttttggctgggtttttccttgttcgcaccggacacctccagtgaccagacggcaaggtttttatcccagtgtatattggaaaaacatgttatacttttgacaatttaacgtgcctagagctcaaattaaactaataccataacgtaatgcaacttacaacataaataaaggtcaatgtttaatccataaaaaaaaaaaaaaaaaaa

SEQ ID NO: 225 - DNA, 1370 bp, synthetic construct
  misc_feature 1..1370: note = Synthetic
  source 1..1370: mol_type = other DNA
tagttattaatagtaatcaattacggggtcattagttcatagcccatatatggagttccgcgttacataacttacggtaaatggcccgcctggctgaccgcccaacgacccccgcccattgacgtcaataatgacgtatgttcccatagtaacgccaatagggactttccattgacgtcaatgggtggagtatttacggtaaactgcccacttggcagtacatcaagtgtatcatatgccaagtacgccccctattgacgtcaatgacggtaaatggcccgcctggcattatgcccagtacatgaccttatgggactttcctacttggcagtacatctacgtattagtcatcgctattaccatggtgatgcggttttggcagtacatcaatgggcgtggatagcggtttgactcacggggatttccaagtctccaccccattgacgtcaatgggagtttgttttggcaccaaaatcaacgggactttccaaaatgtcgtaacaactccgccccattgacgcaaatgggcggtaggcgtgtacggtgggaggtctatataagcagagctggtttagtgaaccgtcagatcgttcactgccgtataggcagggcccagactgagcacgtgagttttagagctagaaatagcaagttaaaataaggctagtccgttatcaacttgaaaaagtgggaccgagtcggtcctctgccatcaaagcgtgctcagtctgttttgttttggctgggtttttccttgttcgcaccggacacctccagtgaccagacggcaaggtttttatcccagtgtatattggaaaaacatgttatacttttgacaatttaacgtgcctagagctcaaattaaactaataccataacgtaatgcaacttacaacataaataaaggtcaatgtttaatccataaaaaaaaaaaaaaaaaaaacacactgttttggctgggtttttccttgttcgcaccggacacctccagtgaccagacggcaaggtttttatcccagtgtatattggaaaaacatgttatacttttgacaatttaacgtgcctagagctcaaattaaactaataccataacgtaatgcaacttacaacataaataaaggtcaatgtttaatccataaaaaaaaaaaaaaaaaaatctctctgttttggctgggtttttccttgttcgcaccggacacctccagtgaccagacggcaaggtttttatcccagtgtatattggaaaaacatgttatacttttgacaatttaacgtgcctagagctcaaattaaactaataccataacgtaatgcaacttacaacataaataaaggtcaatgtttaatccataaaaaaaaaaaaaaaaaaa

SEQ ID NO: 226 - DNA, 807 bp, synthetic construct
  misc_feature 1..807: note = Synthetic
  source 1..807: mol_type = other DNA
tagttattaatagtaatcaattacggggtcattagttcatagcccatatatggagttccgcgttacataacttacggtaaatggcccgcctggctgaccgcccaacgacccccgcccattgacgtcaataatgacgtatgttcccatagtaacgccaatagggactttccattgacgtcaatgggtggagtatttacggtaaactgcccacttggcagtacatcaagtgtatcatatgccaagtacgccccctattgacgtcaatgacggtaaatggcccgcctggcattatgcccagtacatgaccttatgggactttcctacttggcagtacatctacgtattagtcatcgctattaccatggtgatgcggttttggcagtacatcaatgggcgtggatagcggtttgactcacggggatttccaagtctccaccccattgacgtcaatgggagtttgttttggcaccaaaatcaacgggactttccaaaatgtcgtaacaactccgccccattgacgcaaatgggcggtaggcgtgtacggtgggaggtctatataagcagagctggtttagtgaaccgtcagatcgttcactgccgtataggcagggcccagactgagcacgtgagttttagagctagaaatagcaagttaaaataaggctagtccgttatcaacttgaaaaagtgggaccgagtcggtcctctgccatcaaagcgtgctcagtctgtttgtttcaaaagtagactgtacgctaagggtcatatctttttttgtttggtttgtgtcttggttggcgtcttaaa

SEQ ID NO: 227 - DNA, 743 bp, synthetic construct
  misc_feature 1..743: note = Synthetic
  source 1..743: mol_type = other DNA
ctaaggaccagcttctttgggagagaacagacgcaggggcgggagggaaaaagggagaggcagacgtcacttccccttggcggctctggcagcagattggtcggttgagtggcagaaaggcagacggggactgggcaaggcactgtcggtgacatcacggacagggcgacttctatgtagatgaggcagcgcagaggctgctgcttcgccacttgctgcttcaccacgaaggagttcccgtgccctgggagcgggttcaggaccgctgatcggaagtgagaatcccagctgtgtgtcagggctggaaagggctcgggagtgcgcggggcaagtgaccgtgtgtgtaaagagtgaggcgtatgaggctgtgtcggggcagaggcccaagatctcagttcactgccgtataggcagggcccagactgagcacgtgagttttagagctagaaatagcaagttaaaataaggctagtccgttatcaacttgaaaaagtgggaccgagtcggtcctctgccatcaaagcgtgctcagtctgtttcagcaagttcagagaaatctgaacttgctggatttttggagcagggagatggaataggagcttgctccgtccactccacgcatcgacctggtattgcagtacctccaggaacggtgcacccactttctggagtttcaaaagtagactgtacgctaagggtcatatctttttttgtttggtttgtgtcttggttggcgtcttaaa

SEQ ID NO: 228 - DNA, 141 bp, synthetic construct
  misc_feature 1..141: note = Synthetic
  source 1..141: mol_type = other DNA
ggcccagactgagcacgtgagttttagagctagctcatgaaaatgagctagcaagttaaaataaggctagtccgttatcaacttgaaaaagtgggaccgagtcggtcctctgccatcaaagcgtgctcagtctgttttttt

SEQ ID NO: 229 - DNA, 129 bp, synthetic construct
  misc_feature 1..129: note = Synthetic
  source 1..129: mol_type = other DNA
ggcccagactgagcacgtgagtttgagagctagaaatagcaagtttaaataaggctagtccgttatcaacttgaaaaagtgggaccgagtcggtcctctgccatcaaagcgtgctcagtctgttttttt

SEQ ID NO: 230 - DNA, 197 bp, synthetic construct
  misc_feature 1..197: note = Synthetic
  source 1..197: mol_type = other DNA
ggcccagactgagcacgtgagttttagagctagaaatagcaagttaaaataaggctagtccgttatcaacttgaaaaagtgggaccgagtcggtcctctgccatcaaagcgtgctcagtctgggccggcatggtcccagcctcctcgctggcgccggctgggcaacatgcttcggcatggcgaatgggacttttttt

SEQ ID NO: 231 - DNA, 171 bp, synthetic construct
  misc_feature 1..171: note = Synthetic
  source 1..171: mol_type = other DNA
ggtgggagacgtcccaccggcccagactgagcacgtgagttttagagctagaaatagcaagttaaaataaggctagtccgttatcaacttgaaaaagtgggaccgagtcggtcctctgccatcaaagcttcgaccgtgctcagtctggtgggagacgtcccaccttttttt

SEQ ID NO: 232 - DNA, 180 bp, synthetic construct
  misc_feature 1..180: note = Synthetic
  source 1..180: mol_type = other DNA
gagcagcatggcgtcgctgctcacggcccagactgagcacgtgagttttagagctagaaatagcaagttaaaataaggctagtccgttatcaacttgaaaaagtgggaccgagtcggtcctctgccatcaaagcttcgaccgtgctcagtctccatcagttgacaccctgaggttttttt

SEQ ID NO: 233 - DNA, 188 bp, synthetic construct
  misc_feature 1..188: note = Synthetic
  source 1..188: mol_type = other DNA
  modified_base 15: mod_base = OTHER; note = Uracil
  modified_base 61: mod_base = OTHER; note = Uracil
  modified_base 101: mod_base = OTHER; note = Uracil
gcagacctaagtggtgacatatggtctgggcccagactgagcacgtgagttttagagctatacgtagcaagttaaaataaggctagtccgttatcaactttacgaagtgggaccgagtcggtcctctgccatcaaagcttcgaccgtgctcagtctgcatgcgattagaaataatcgcatgttttttt

SEQ ID NO: 234 - DNA, 125 bp, synthetic construct
  misc_feature 1..125: note = Synthetic
  source 1..125: mol_type = other DNA
tctgccatcaaagctgcgaccgtgctcagtctggtgggagacgtcccaccggccggcatggtcccagcctcctcgctggcgccggctgggcaacatgcttcggcatggcgaatgggacttttttt

SEQ ID NO: 235 - protein, 328 aa, unidentified; identical to SEQ ID NO: 129
  REGION 1..328: note = Bordetella phage

SEQ ID NO: 236 - protein, 128 aa, unidentified
  REGION 1..128: note = Bordetella phage
MEPIEEATKCYDQMLIVERYERVISYLYPIAQSIPRKHGVAREMFLKCLLGQVELFIVAGKSNQVSKLYAADAGLAMLRFWLRFLAGIQKPHAMTPHQVETAQVLIAEVGRILGSWIARVNRKGQAGK

SEQ ID NO: 237 - RNA, 169 nt, unidentified
  misc_feature 1..169: note = Bordetella phage
  source 1..169: mol_type = genomic RNA
accttcttgcatggctctgccaacgctacggcttggcgggctggcctttcctcaataggtggtcagccggttctgtcctgcttcggcgaacacgttacacggttcggcaaaacgtcgattactgaaaatggaaaggcggggccgacttcaagggcaggctgggaaataa

SEQ ID NO: 238 - RNA, 149 nt, synthetic construct
  misc_feature 1..149: note = Synthetic
  source 1..149: mol_type = other RNA
accttcttgcatggctctgccaacgctacggcttggcgggctggcctttcctcaataggtggtcagccggttctgtcctgcttcggcgaacacgttacacggttcggcaaaacgtcgattactgaaaatggaaaggcggggccgacttc

SEQ ID NO: 239 - RNA, 85 nt, synthetic construct
  misc_feature 1..85: note = Synthetic
  source 1..85: mol_type = other RNA
accttcttgcatggctctgccaacgctacggcttggcgggctggcctttcctcaataggtggtcaaagggcaggctgggaaataa

SEQ ID NO: 240 - RNA, 160 nt, synthetic construct
  misc_feature 1..160: note = Synthetic
  source 1..160: mol_type = other RNA
catggctctgccaacgctacggcttggcgggctggcctttcctcaataggtggtcagccggttctgtcctgcttcggcgaacacgttacacggttcggcaaaacgtcgattactgaaaatggaaaggcggggccgacttcaagggcaggctgggaaataa

SEQ ID NO: 241 - RNA, 140 nt, synthetic construct
  misc_feature 1..140: note = Synthetic
  source 1..140: mol_type = other RNA
catggctctgccaacgctacggcttggcgggctggcctttcctcaataggtggtcagccggttctgtcctgcttcggcgaacacgttacacggttcggcaaaacgtcgattactgaaaatggaaaggcggggccgacttc

SEQ ID NO: 242 - RNA, 76 nt, synthetic construct
  misc_feature 1..76: note = Synthetic
  source 1..76: mol_type = other RNA
catggctctgccaacgctacggcttggcgggctggcctttcctcaataggtggtcaaagggcaggctgggaaataa

SEQ ID NO: 243 - RNA, 56 nt, synthetic construct
  misc_feature 1..56: note = Synthetic
  source 1..56: mol_type = other RNA
catggctctgccaacgctacggcttggcgggctggcctttcctcaataggtggtca

SEQ ID NO: 244 - RNA, 169 nt, synthetic construct
  misc_feature 1..169: note = Synthetic
  source 1..169: mol_type = other RNA
accttcttgcatggctctgccaacgctacggcttggcgggctggcctttcctcaatagatgagccgccggttctgtcctgcttcggcgaacacgttacacggttcggcaaaacgtcgattactgaaaatggaaaggcggggccgacttcaagggcaggctgggaaataa

SEQ ID NO: 245 - protein, 15 aa, synthetic construct
  REGION 1..15: note = Synthetic
GLNDIFEAQKIEWHE

SEQ ID NO: 246 - protein, 4 aa, synthetic construct
  REGION 1..4: note = Synthetic
EPEA

SEQ ID NO: 247 - protein, 26 aa, synthetic construct
  REGION 1..26: note = Synthetic
KRRWKKNFIAVSAANRFKKISSSGAL

SEQ ID NO: 248 - protein, 6 aa, synthetic construct
  REGION 1..6: note = Synthetic
EEEEEE

SEQ ID NO: 249 - protein, 13 aa, synthetic construct
  REGION 1..13: note = Synthetic
GAPVPYPDPLEPR

SEQ ID NO: 250 - protein, 8 aa, synthetic construct
  REGION 1..8: note = Synthetic
DYKDDDDK

SEQ ID NO: 251 - protein, 9 aa, synthetic construct
  REGION 1..9: note = Synthetic
YPYDVPDYA

SEQ ID NO: 252-254 - skipped (3 entries)

SEQ ID NO: 255 - protein, 4 aa, synthetic construct
  REGION 1..4: note = Synthetic
HHHH

SEQ ID NO: 256 - protein, 5 aa, synthetic construct
  REGION 1..5: note = Synthetic
HHHHH

SEQ ID NO: 257 - protein, 6 aa, synthetic construct
  REGION 1..6: note = Synthetic
HHHHHH

SEQ ID NO: 258 - protein, 7 aa, synthetic construct
  REGION 1..7: note = Synthetic
HHHHHHH

SEQ ID NO: 259 - protein, 8 aa, synthetic construct
  REGION 1..8: note = Synthetic
HHHHHHHH

SEQ ID NO: 260 - protein, 9 aa, synthetic construct
  REGION 1..9: note = Synthetic
HHHHHHHHH

SEQ ID NO: 261 - protein, 10 aa, synthetic construct
  REGION 1..10: note = Synthetic
HHHHHHHHHH

SEQ ID NO: 262 - protein, 25 aa, synthetic construct
  REGION 1..25: note = Synthetic
  REGION 2..25: note = misc_feature - may be absent
HHHHHHHHHHHHHHHHHHHHHHHHH

SEQ ID NO: 263 - protein, 10 aa, synthetic construct
  REGION 1..10: note = Synthetic
EQKLISEEDL

SEQ ID NO: 264 - protein, 18 aa, synthetic construct
  REGION 1..18: note = Synthetic
TKENPRSNQEESYDDNES

SEQ ID NO: 265 - protein, 9 aa, synthetic construct
  REGION 1..9: note = Synthetic
TETSQVAPA

SEQ ID NO: 266 - protein, 15 aa, synthetic construct
  REGION 1..15: note = Synthetic
KETAAAKFERQHMDS

SEQ ID NO: 267 - protein, 38 aa, synthetic construct
  REGION 1..38: note = Synthetic
MDEKTTGWRGGHVVEGLAGELEQLRARLEHHPQGQREP

SEQ ID NO: 268 - protein, 13 aa, synthetic construct
  REGION 1..13: note = Synthetic
SLAELLNAGLGGS

SEQ ID NO: 269 - protein, 8 aa, synthetic construct
  REGION 1..8: note = Synthetic
TQDPSRVG

SEQ ID NO: 270 - protein, 12 aa, synthetic construct
  REGION 1..12: note = Synthetic
PDRVRAVSHWSS

SEQ ID NO: 271 - protein, 8 aa, synthetic construct
  REGION 1..8: note = Synthetic
WSHPQFEK

SEQ ID NO: 272 - protein, 6 aa, synthetic construct
  REGION 1..6: note = Synthetic
CCPGCC

SEQ ID NO: 273 - protein, 10 aa, synthetic construct
  REGION 1..10: note = Synthetic
EVHTNQDPLD

SEQ ID NO: 274 - protein, 14 aa, synthetic construct
  REGION 1..14: note = Synthetic
GKPIPNPLLGLDST

SEQ ID NO: 275 - protein, 11 aa, synthetic construct
  REGION 1..11: note = Synthetic
YTDIEMNRLGK

SEQ ID NO: 276 - protein, 8 aa, synthetic construct
  REGION 1..8: note = Synthetic
DLYDDDDK

SEQ ID NO: 277 - RNA, 65 nt, synthetic construct
  misc_feature 1..65: note = Synthetic
  source 1..65: mol_type = other RNA
accttcttgcatggctctgccaacgctacggcttggcgggctggcctttcctcaataggtggtca

SEQ ID NO: 278 - protein, 6 aa, synthetic construct
  REGION 1..6: note = Synthetic
DTYRYI

SEQ ID NO: 279 - protein, 6 aa, synthetic construct
  REGION 1..6: note = Synthetic
TDFYLK

SEQ ID NO: 280 - protein, 11 aa, synthetic construct
  REGION 1..11: note = Synthetic
MASMTGGQQMG

SEQ ID NO: 281 - protein, 6 aa, synthetic construct
  REGION 1..6: note = Synthetic
QYPALT

SEQ ID NO: 282 - protein, 10 aa, synthetic construct
  REGION 1..10: note = Synthetic
SSTSSDFRDR

SEQ ID NO: 283 - protein, 19 aa, synthetic construct
  REGION 1..19: note = Synthetic
KDHLIHNVHKEFHAHAHNK

SEQ ID NO: 284 - protein, 8 aa, synthetic construct
  REGION 1..8: note = Synthetic
QPELAPED

SEQ ID NO: 285 - protein, 5 aa, synthetic construct
  REGION 1..5: note = Synthetic
RRRRR

SEQ ID NO: 286 - protein, 4 aa, synthetic construct
  REGION 1..4: note = Synthetic
CCCC

SEQ ID NO: 287 - protein, 11 aa, synthetic construct
  REGION 1..11: note = Synthetic
FFFFFFFFFFF

SEQ ID NO: 288 - protein, 9 aa, synthetic construct
  REGION 1..9: note = Synthetic
NANNPDWDF

SEQ ID NO: 289 - protein, 15 aa, synthetic construct
  REGION 1..15: note = Synthetic
KETAAAKFERQHMDS

SEQ ID NO: 290 - protein, 11 aa, synthetic construct
  REGION 1..11: note = Synthetic
YTDIEMNRLGK

SEQ ID NO: 291 - protein, 253 aa, Homo sapiens
MANLGCWMLVLFVATWSDLGLCKKRPKPGGWNTGGSRYPGQGSPGGNRYPPQGGGGWGQPHGGGWGQPHGGGWGQPHGGGWGQPHGGGWGQGGGTHSQWNKPSKPKTNMKHMAGAAAAGAVVGGLGGYMLGSAMSRPIIHFGSDYEDRYYRENMHRYPNQVYYRPMDEYSNQNNFVHDCVNITIKQHTVTTTTKGENFTETDVKMMERVVEQMCITQYERESQAYYQRGSSMVLFSSPPVILLISFLIFLIVG

SEQ ID NO: 292 - DNA, 2365 bp, Homo sapiens
  source 1..2365: mol_type = genomic DNA
gcgaaccttggctgctggatgctggttctctttgtggccacatggagtgacctgggcctctgcaagaagcgcccgaagcctggaggatggaacactgggggcagccgatacccggggcagggcagccctggaggcaaccgctacccacctcagggcggtggtggctgggggcagcctcatggtggtggctgggggcagcctcatggtggtggctgggggcagccccatggtggtggctggggacagcctcatggtggtggctggggtcaaggaggtggcacccacagtcagtggaacaagccgagtaagccaaaaaccaacatgaagcacatggctggtgctgcagcagctggggcagtggtggggggccttggcggctacatgctgggaagtgccatgagcaggcccatcatacatttcggcagtgactatgaggaccgttactatcgtgaaaacatgcaccgttaccccaaccaagtgtactacaggcccatggatgagtacagcaaccagaacaactttgtgcacgactgcgtcaatatcacaatcaagcagcacacggtcaccacaaccaccaagggggagaacttcaccgagaccgacgttaagatgatggagcgcgtggttgagcagatgtgtatcacccagtacgagagggaatctcaggcctattaccagagaggatcgagcatggtcctcttctcctctccacctgtgatcctcctgatctctttcctcatcttcctgatagtgggatgaggaaggtcttcctgttttcaccatctttctaatctttttccagcttgagggaggcggtatccacctgcagcccttttagtggtggtgtctcactctttcttctctctttgtcccggataggctaatcaatacccttggcactgatgggcactggaaaacatagagtagacctgagatgctggtcaagccccctttgattgagttcatcatgagccgttgctaatgccaggccagtaaaagtataacagcaaataaccattggttaatctggacttatttttggacttagtgcaacaggttgaggctaaaacaaatctcagaacagtctgaaatacctttgcctggatacctctggctccttcagcagctagagctcagtatactaatgccctatcttagtagagatttcatagctatttagagatattttccattttaagaaaacccgacaacatttctgccaggtttgttaggaggccacatgatacttattcaaaaaaatcctagagattcttagctcttgggatgcaggctcagcccgctggagcatgagctctgtgtgtaccgagaactggggtgatgttttacttttcacagtatgggctacacagcagctgttcaacaagagtaaatattgtcacaacactgaacctctggctagaggacatattcacagtgaacataactgtaacatatatgaaaggcttctgggacttgaaatcaaatgtttgggaatggtgcccttggaggcaacctcccattttagatgtttaaaggaccctatatgtggcattcctttctttaaactataggtaattaaggcagctgaaaagtaaattgccttctagacactgaaggcaaatctcctttgtccatttacctggaaaccagaatgattttgacatacaggagagctgcagttgtgaaagcaccatcatcatagaggatgatgtaattaaaaaatggtcagtgtgcaaagaaaagaactgcttgcatttctttatttctgtctcataattgtcaaaaaccagaattaggtcaagttcatagtttctgtaattggcttttgaatcaaagaatagggagacaatctaaaaaatatcttaggttggagatgacagaaatatgattgatttgaagtggaaaaagaaattctgttaatgttaattaaagtaaaattattccctgaattgtttgatattgtcacctagcagatatgtattacttttctgcaatgttattattggcttgcactttgtgagtattctatgtaaaaatatatatgtatataaaatatatattgcataggacagacttaggagttttgtttagagcagttaacatctgaagtgtctaatgcattaacttttgtaaggtactgaatacttaatatgtgggaaacccttttgcgtggtccttaggcttacaatgtgcactgaatcgtttcatgtaagaatccaaagtggacaccattaacaggtctttgaaatatgcatgtactttatattttctatatttgtaactttgcatgttcttgttttgttatataaaaaaattgtaaatgtttaatatctgactgaaattaaacgagcgaagatgagcacca

SEQ ID NO: 293 - protein, 253 aa, synthetic construct
  REGION 1..253: note = Synthetic
MANLGCWMLVLFVATWSDLGLCKKRPKPGGWNTGGSRYPGQGSPGGNRYPPQGGGGWGQPHGGGWGQPHGGGWGQPHGGGWGQPHGGGWGQGGGTHSQWNKPSKPKTNMKHMAGAAAAGAVVGGLGGYMLGSAMSRPIIHFGSDYEDRYYRENMHRYPNQVYYRPMDEYSNQNNFVHNCVNITIKQHTVTTTTKGENFTETDVKMMERVVEQMCITQYERESQAYYQRGSSMVLFSSPPVILLISFLIFLIVG

SEQ ID NO: 294 - protein, 253 aa, synthetic construct
  REGION 1..253: note = Synthetic
MANLGCWMLVLFVATWSDLGLCKKRPKPGGWNTGGSRYPGQGSPGGNRYPPQGGGGWGQPHGGGWGQPHGGGWGQPHGGGWGQPHGGGWGQGGGTHSQWNKPSKPKTNMKHMAGAAAAGAVVGGLGGYMLGSAMSRPIIHFGSDYEDRYYRENMHRYPNQVYYRPMDEYSNQNNFVHDCVNITIKQHKVTTTTKGENFTETDVKMMERVVEQMCITQYERESQAYYQRGSSMVLFSSPPVILLISFLIFLIVG

SEQ ID NO: 295 - protein, 253 aa, synthetic construct
  REGION 1..253: note = Synthetic
MANLGCWMLVLFVATWSDLGLCKKRPKPGGWNTGGSRYPGQGSPGGNRYPPQGGGGWGQPHGGGWGQPHGGGWGQPHGGGWGQPHGGGWGQGGGTHSQWNKPSKPKTNMKHMAGAAAAGAVVGGLGGYMLGSAMSRPIIHFGSDYEDRYYRENMHRYPNQVYYRPMDEYSNQNNFVHDCVNITIKQHTVTTTTKGKNFTETDVKMMERVVEQMCITQYERESQAYYQRGSSMVLFSSPPVILLISFLIFLIVG

SEQ ID NO: 296 - protein, 240 aa, synthetic construct
  REGION 1..240: note = Synthetic
MANLGCWMLVLFVATWSDLGLCKKRPKPGGWNTGGSRYPGQGSPGGNRYPPQGGGGWGQPHGGGWGQPHGGGWGQPHGGGWGQPHGGGWGQGGGTHSQWNKPSKPKTNMKHMAGAAAAGAVVGGLGGYMLGSAMSRPIIHFGSDYEDRYYRENMHRYPNQVYYRPMDEYSNQNNFVHDCVNITIKQHTVTTTTKGANFTETDVKMMERVVEQMCITQYERESQAYYQRGSSMVLFSSPPV

SEQ ID NO: 297 - protein, 253 aa, synthetic construct
  REGION 1..253: note = Synthetic
MANLGCWMLVLFVATWSDLGLCKKRPKPGGWNTGGSRYPGQGSPGGNRYPPQGGGGWGQPHGGGWGQPHGGGWGQPHGGGWGQPHGGGWGQGGGTHSQWNKPSKPKTNMKHMAGAAAAGAVVGGLGGYMLGSAMSRPIIHFGSDYEDRYYRENMHRYPNQVYYRPMDEYSNQNNFVHDCVNITIKQHTVTTTTKGENFTKTDVKMMERVVEQMCITQYERESQAYYQRGSSMVLFSSPPVILLISFLIFLIVG

SEQ ID NO: 298 - protein, 240 aa, synthetic construct
  REGION 1..240: note = Synthetic
MANLGCWMLVLFVATWSDLGLCKKRPKPGGWNTGGSRYPGQGSPGGNRYPPQGGGGWGQPHGGGWGQPHGGGWGQPHGGGWGQPHGGGWGQGGGTHSQWNKPSKPKTNMKHMAGAAAAGAVVGGLGGYMLGSAMSRPIIHFGSDYEDRYYRENMHRYPNQVYYRPMDEYSNQNNFVHDCVNITIKQHTVTTTTKGENFTGTDVKMMERVVEQMCITQYERESQAYYQRGSSMVLFSSPPV

SEQ ID NO: 299 - protein, 253 aa, synthetic construct
  REGION 1..253: note = Synthetic
MANLGCWMLVLFVATWSDLGLCKKRPKPGGWNTGGSRYPGQGSPGGNRYPPQGGGGWGQPHGGGWGQPHGGGWGQPHGGGWGQPHGGGWGQGGGTHSQWNKPSKPKTNMKHMAGAAAAGAVVGGLGGYMLGSAMSRPIIHFGSDYEDRYYRENMHRYPNQVYYRPMDEYSNQNNFVHDCVNITIKQHTVTTTTKGENFTETDIKMMERVVEQMCITQYERESQAYYQRGSSMVLFSSPPVILLISFLIFLIVG

SEQ ID NO: 300 - protein, 253 aa, synthetic construct
  REGION 1..253: note = Synthetic
MANLGCWMLVLFVATWSDLGLCKKRPKPGGWNTGGSRYPGQGSPGGNRYPPQGGGGWGQPHGGGWGQPHGGGWGQPHGGGWGQPHGGGWGQGGGTHSQWNKPSKPKTNMKHMAGAAAAGAVVGGLGGYMLGSAMSRPIIHFGSDYEDRYYRENMHRYPNQVYYRPMDEYSNQNNFVHDCVNITIKQHTVTTTTKGENFTETDVKMMEHVVEQMCITQYERESQAYYQRGSSMVLFSSPPVILLISFLIFLIVG

SEQ ID NO: 301 - protein, 253 aa, synthetic construct
  REGION 1..253: note = Synthetic
MANLGCWMLVLFVATWSDLGLCKKRPKPGGWNTGGSRYPGQGSPGGNRYPPQGGGGWGQPHGGGWGQPHGGGWGQPHGGGWGQPHGGGWGQGGGTHSQWNKPSKPKTNMKHMAGAAAAGAVVGGLGGYMLGSAMSRPIIHFGSDYEDRYYRENMHRYPNQVYYRPMDEYSNQNNFVHDCVNITIKQHTVTTTTKGENFTETDVKMMERVIEQMCITQYERESQAYYQRGSSMVLFSSPPVILLISFLIFLIVG

SEQ ID NO: 302 - protein, 253 aa, synthetic construct
  REGION 1..253: note = Synthetic
MANLGCWMLVLFVATWSDLGLCKKRPKPGGWNTGGSRYPGQGSPGGNRYPPQGGGGWGQPHGGGWGQPHGGGWGQPHGGGWGQPHGGGWGQGGGTHSQWNKPSKPKTNMKHMAGAAAAGAVVGGLGGYMLGSAMSRPIIHFGSDYEDRYYRENMHRYPNQVYYRPMDEYSNQNNFVHDCVNITIKQHTVTTTTKGENFTETDVKMMERVVQQMCITQYERESQAYYQRGSSMVLFSSPPVILLISFLIFLIVG

SEQ ID NO: 303 - protein, 253 aa, synthetic construct
  REGION 1..253: note = Synthetic
MANLGCWMLVLFVATWSDLGLCKKRPKPGGWNTGGSRYPGQGSPGGNRYPPQGGGGWGQPHGGGWGQPHGGGWGQPHGGGWGQPHGGGWGQGGGTHSQWNKPSKPKTNMKHMAGAAAAGAVVGGLGGYMLGSAMSRPIIHFGSDYEDRYYRENMHRYPNQVYYRPMDEYSNQNNFVHDCVNITIKQHTVTTTTKGENFTETDVKMMERVVEQMCITQYERESQAYYQRGSSRVLFSSPPVILLISFLIFLIVG

SEQ ID NO: 304 - protein, 253 aa, synthetic construct
  REGION 1..253: note = Synthetic
MANLGCWMLVLFVATWSDLGLCKKRPKPGGWNTGGSRYPGQGSPGGNRYPPQGGGGWGQPHGGGWGQPHGGGWGQPHGGGWGQPHGGGWGQGGGTHSQWNKLSKPKTNMKHMAGAAAAGAVVGGLGGYMLGSAMSRPIIHFGSDYEDRYYRENMHRYPNQVYYRPMDEYSNQNNFVHDCVNITIKQHTVTTTTKGENFTETDVKMMERVVEQMCITQYERESQAYYQRGSSMVLFSSPPVILLISFLIFLIVG

SEQ ID NO: 305 - protein, 253 aa, synthetic construct
  REGION 1..253: note = Synthetic
MANLGCWMLVLFVATWSDLGLCKKRPKPGGWNTGGSRYPGQGSPGGNRYPPQGGGGWGQPHGGGWGQPHGGGWGQPHGGGWGQPHGGGWGQGGGTHSQWNKPSKLKTNMKHMAGAAAAGAVVGGLGGYMLGSAMSRPIIHFGSDYEDRYYRENMHRYPNQVYYRPMDEYSNQNNFVHDCVNITIKQHTVTTTTKGENFTETDVKMMERVVEQMCITQYERESQAYYQRGSSMVLFSSPPVILLISFLIFLIVG

SEQ ID NO: 306 - protein, 253 aa, synthetic construct
  REGION 1..253: note = Synthetic
MANLGCWMLVLFVATWSDLGLCKKRPKPGGWNTGGSRYPGQGSPGGNRYPPQGGGGWGQPHGGGWGQPHGGGWGQPHGGGWGQPHGGGWGQGGGTHSQWNKPSKPKTNMKHMAGAAVAGAVVGGLGGYMLGSAMSRPIIHFGSDYEDRYYRENMHRYPNQVYYRPMDEYSNQNNFVHDCVNITIKQHTVTTTTKGENFTETDVKMMERVVEQMCITQYERESQAYYQRGSSMVLFSSPPVILLISFLIFLIVG

SEQ ID NO: 307 - protein, 253 aa, synthetic construct
  REGION 1..253: note = Synthetic
MANLGCWMLVLFVATWSDLGLCKKRPKPGGWNTGGSRYPGQGSPGGNRYPPQGGGGWGQPHGGGWGQPHGGGWGQPHGGGWGQPHGGGWGQGGGTHSQWNKPSKPKTNMKHMAGAAAAGAVVGGLGGYMLVSAMSRPIIHFGSDYEDRYYRENMHRYPNQVYYRPMDEYSNQNNFVHDCVNITIKQHTVTTTTKGENFTETDVKMMERVVEQMCITQYERESQAYYQRGSSMVLFSSPPVILLISFLIFLIVG

SEQ ID NO: 308 - protein, 253 aa, synthetic construct
  REGION 1..253: note = Synthetic
MANLGCWMLVLFVATWSDLGLCKKRPKPGGWNTGGSRYPGQGSPGGNRYPPQGGGGWGQPHGGGWGQPHGGGWGQPHGGGWGQPHGGGWGQGGGTHSQWNKPSKPKTNMKHMAGAAAAGAVVGGLGGYMLGSAMSRPIIHFGSDYEDRYYRENMHRYPNQVYYRPMDEYSNQNNFGHDCVNITIKQHTVTTTTKGENFTETDVKMMERVVEQMCITQYERESQAYYQRGSSMVLFSSPPVILLISFLIFLIVG

SEQ ID NO: 309 - protein, 253 aa, synthetic construct
  REGION 1..253: note = Synthetic
MANLGCWMLVLFVATWSDLGLCKKRPKPGGWNTGGSRYPGQGSPGGNRYPPQGGGGWGQPHGGGWGQPHGGGWGQPHGGGWGQPHGGGWGQGGGTHSQWNKPSKPKTNMKHMAGAAAAGAVVGGLGGYMLGSAMSRPIIHFGSDYEDRYYRENMHRYPNQVYYRPMDEYSNQNNFVHDCVNITIKQRTVTTTTKGENFTETDVKMMERVVEQMCITQYERESQAYYQRGSSMVLFSSPPVILLISFLIFLIVG

SEQ ID NO: 310 - skipped

SEQ ID NO: 311 - protein, 253 aa, synthetic construct
  REGION 1..253: note = Synthetic
MANLGCWMLVLFVATWSDLGLCKKRPKPGGWNTGGSRYPGQGSPGGNRYPPQGGGGWGQPHGGGWGQPHGGGWGQPHGGGWGQPHGGGWGQGGGTHSQWNKPSKPKTNMKHMAGAAAAGAVVGGLGGYMLGSAMSRPIIHFGSDYEDRYYRENMHRYPNQVYYRPMDEYSNQNNFVHDCVNITIKQHTVTTTTKGENSTETDVKMMERVVEQMCITQYERESQAYYQRGSSMVLFSSPPVILLISFLIFLIVG

SEQ ID NO: 312 - protein, 253 aa, synthetic construct
  REGION 1..253: note = Synthetic
MANLGCWMLVLFVATWSDLGLCKKRPKPGGWNTGGSRYPGQGSPGGNRYPPQGGGGWGQPHGGGWGQPHGGGWGQPHGGGWGQPHGGGWGQGGGTHSQWNKPSKPKTNMKHMAGAAAAGAVVGGLGGYMLGSAMSRPIIHFGSDYEDRYYRENMHRYPNQVYYRPMDEYSNQNNFVHDCVNITIKQHTVTTTTKGENFTETNVKMMERVVEQMCITQYERESQAYYQRGSSMVLFSSPPVILLISFLIFLIVG

SEQ ID NO: 313 - protein, 253 aa, synthetic construct
  REGION 1..253: note = Synthetic
MANLGCWMLVLFVATWSDLGLCKKRPKPGGWNTGGSRYPGQGSPGGNRYPPQGGGGWGQPHGGGWGQPHGGGWGQPHGGGWGQPHGGGWGQGGGTHSQWNKPSKPKTNMKHMAGAAAAGAVVGGLGGYMLGSAMSRPIIHFGSDYEDRYYRENMHRYPNQVYYRPMDEYSNQNNFVHDCVNITIKQHTVTTTTKGENFTETDVKMMERVVEPMCITQYERESQAYYQRGSSMVLFSSPPVILLISFLIFLIVG

SEQ ID NO: 314 - protein, 253 aa, synthetic construct
  REGION 1..253: note = Synthetic
MANLGCWMLVLFVATWSDLGLCKKRPKPGGWNTGGSRYPGQGSPGGNRYPPQGGGGWGQPHGGGWGQPHGGGWGQPHGGGWGQPHGGGWGQGGGTHSQWNKPSKPKTNMKHMAGAAAAGAVVGGLGGYMLGSAMSRPIIHFGSDYEDRYYRENMHRYPNQVYYRPMDEYSNQNNFVHDCVNITIKQHTVTTTTKGENFTETDVKMMERVVEQMCITRYERESQAYYQRGSSMVLFSSPPVILLISFLIFLIVG

SEQ ID NO: 315 - protein, 253 aa, synthetic construct
  REGION 1..253: note = Synthetic
MANLGCWMLVLFVATWSDLGLCKKRPKPGGWNTGGSRYPGQGSPGGNRYPPQGGGGWGQPHGGGWGQPHGGGWGQPHGGGWGQPHGGGWGQGGGTHSQWNKPSKPKTNMKHMAGAAAAGAVVGGLGGYMLGSAMSRPIIHFGSDYEDRYYRENMHRYPNQVYYRPMDEYSNQNNFVHDCVNITIKQHTVTTTTKGENFTETDVKMMERVVEQMCITQYERESQAYYQRGSSTVLFSSPPVILLISFLIFLIVG

SEQ ID NO: 316 - protein, 253 aa, synthetic construct
  REGION 1..253: note = Synthetic
MANLGCWMLVLFVATWSDLGLCKKRPKPGGWNTGGSRYPGQGSPGGNRYPPQGGGGWGQPHGGGWGQPHGGGWGQPHGGGWGQPHGGGWGQGGGTHSQWNKPSKPKTNMKHMAGAAAAGAVVGGLGSYMLGSAMSRPIIHFGSDYEDRYYRENMHRYPNQVYYRPMDEYSNQNNFVHDCVNITIKQHTVTTTTKGENFTETDVKMMERVVEQMCITQYERESQAYYQRGSSMVLFSSPPVILLISFLIFLIVG

SEQ ID NO: 317 - protein, 253 aa, synthetic construct
  REGION 1..253: note = Synthetic
MANLGCWMLVLFVATWSDLGLCKKRPKPGGWNTGGSRYPGQGSPGGNRYPPQGGGGWGQPHGGGWGQPHGGGWGQPHGGGWGQPHGGGWGQGGGTHSQWNKPSKPKTNMKHMAGAAAAGAVVGGLGVYMLGSAMSRPIIHFGSDYEDRYYRENMHRYPNQVYYRPMDEYSNQNNFVHDCVNITIKQHTVTTTTKGENFTETDVKMMERVVEQMCITQYERESQAYYQRGSSMVLFSSPPVILLISFLIFLIVG

SEQ ID NO: 318 - protein, 253 aa, synthetic construct
  REGION 1..253: note = Synthetic
MANLGCWMLVLFVATWSDLGLCKKRPKPGGWNTGGSRYPGQGSPGGNRYPPQGGGGWGQPHGGGWGQPHGGGWGQPHGGGWGQPHGGGWGQGGGTHSQWNKPSKPKTNMKHMAGAAAAGAVVGGLGGYVLGSAMSRPIIHFGSDYEDRYYRENMHRYPNQVYYRPMDEYSNQNNFVHDCVNITIKQHTVTTTTKGENFTETDVKMMERVVEQMCITQYERESQAYYQRGSSMVLFSSPPVILLISFLIFLIVG

SEQ ID NO: 319 - protein, 253 aa, synthetic construct
  REGION 1..253: note = Synthetic
MANLGCWMLVLFVATWSDLGLCKKRPKPGGWNTGGSRYPGQGSPGGNRYPPQGGGGWGQPHGGGWGQPHGGGWGQPHGGGWGQPHGGGWGQGGGTHSQWNKPSKPKTNMKHMAGAAAAGAVVGGLGGYMLGSAMSRPIIHFGSDYEDRYYRENMHRYPNQVYYRPMGEYSNQNNFVHDCVNITIKQHTVTTTTKGENFTETDVKMMERVVEQMCITQYERESQAYYQRGSSMVLFSSPPVILLISFLIFLIVG

SEQ ID NO: 320 - protein, 253 aa, synthetic construct
  REGION 1..253: note = Synthetic
MANLGCWMLVLFVATWSDLGLCKKRPKPGGWNTGGSRYPGQGSPGGNRYPPQGGGGWGQPHGGGWGQPHGGGWGQPHGGGWGQPHGGGWGQGGGTHSQWNKPSKPKTNMKHMAGAAAAGAVVGGLGGYMLGSAMSRPIIHFGSDYEDRYYRENMHRYPNQVYYRPMNEYSNQNNFVHDCVNITIKQHTVTTTTKGENFTETDVKMMERVVEQMCITQYERESQAYYQRGSSMVLFSSPPVILLISFLIFLIVG

SEQ ID NO: 321 - protein, 253 aa, synthetic construct
  REGION 1..253: note = Synthetic
MANLGCWMLVLFVATWSDLGLCKKRPKPGGWNTGGSRYPGQGSPGGNRYPPQGGGGWGQPHGGGWGQPHGGGWGQPHGGGWGQPHGGGWGQGGGTHSQWNKPSKPKTNMKHMAGAAAAGAVVGGLGGYMLGSAMSRPIIHFGSDYEDRYYRENMHRYPNQVYYRPMDEYSSQNNFVHDCVNITIKQHTVTTTTKGENFTETDVKMMERVVEQMCITQYERESQAYYQRGSSMVLFSSPPVILLISFLIFLIVG

SEQ ID NO: 322 - protein, 253 aa, synthetic construct [sequence omitted]

SEQ ID NO: 323 - protein, 253 aa, synthetic construct
  REGION 1..253: note = Synthetic
MANLGCWMLVLFVATWSDLGLCKKRPKPGGWNTGGSRYPGQGSPGGNRYPPQGGGGWGQPHGGGWGQPHGGGWGQPHGGGWGQPHGGGWGQGGGTHSQWNKPSKPKTNMKHMAGAAAAGAVVGGLGGYMLGSAMSRPIIHFGSDYEDRYYRENMHRYPNQVYYRPMDEYSNQNNFVHDCVNITIKQHTVTTTTKGENFTETDVKMMERVVEQMCITQYERESQAYYQRGSSMVLFSSSPVILLISFLIFLIVG

SEQ ID NO: 324 - DNA, 119 bp, Homo sapiens
  source 1..119: mol_type = genomic DNA
gcagtggtggggggccttgggttttagagctagaaatagcaagttaaaataaggctagtccgttatcaacttgaaaaagtggcaccgagtcggtgcatgtagacgccaaggccccccac

SEQ ID NO: 325 - DNA, 119 bp, Homo sapiens
  source 1..119: mol_type = genomic DNA
tgtgtatcacccagtacgaggttttagagctagaaatagcaagttaaaataaggctagtccgttatcaacttgaaaaagtggcaccgagtcggtgcagattctctcttgtactgggtga

SEQ ID NO: 326 - DNA, 119 bp, unidentified
  source 1..119: mol_type = genomic DNA; note = Bos Taurus
gcagtggtagggggccttgggttttagagctagaaatagcaagttaaaataaggctagtccgttatcaacttgaaaaagtggcaccgagtcggtgcatgtagacaccaaggccccctac

SEQ ID NO: 327 - DNA, 119 bp, Mesocricetus auratus
  source 1..119: mol_type = genomic DNA
gccgtggtggggggccttgggttttagagctagaaatagcaagttaaaataaggctagtccgttatcaacttgaaaaagtggcaccgagtcggtgcatgtagacaccaaggccccccac

SEQ ID NO: 328 - DNA, 119 bp, Mus musculus
  source 1..119: mol_type = genomic DNA
gcagtagtggggggccttgggttttagagctagaaatagcaagttaaaataaggctagtccgttatcaacttgaaaaagtggcaccgagtcggtgcatgtagacaccaaggccccccac

SEQ ID NO: 329 - DNA, 119 bp, Odocoileus virginianus; identical to SEQ ID NO: 326
  source 1..119: mol_type = genomic DNA

SEQ ID NO: 330 - DNA, 119 bp, unidentified
  misc_feature 1..119: note = Mustela putorius furo
  source 1..119: mol_type = genomic DNA
gcggttgtggggggcctggggttttagagctagaaatagcaagttaaaataaggctagtccgttatcaacttgaaaaagtggcaccgagtcggtgcatgtagacgcccaggccccccac

SEQ ID NO: 331 - DNA, 122 bp, synthetic construct
  misc_feature 1..122: note = Synthetic
  source 1..122: mol_type = other DNA
aacttgtttattgcagcttataatggttacaaataaagcaatagcatcacaaatttcacaaataaagcatttttttcactgcattctagttgtggtttgtccaaactcatcaatgtatctta

SEQ ID NO: 332 - DNA, 252 bp, synthetic construct
  misc_feature 1..252: note = Synthetic
  source 1..252: mol_type = other DNA
atccttccagtcagggccatgtttgagagctagaaatagcaagtttaaataaggctagtccgttatcaacttgaaaaagtgggaccgagtcggtccacctgaaccgtatatctaagatacattgatgagtttggacaaaccacaactagaatgcagtgaaaaaaatgctttatttgtgaaatttgtgatgctattgctttatttgtaaccattataagctgcaataaacaagttctatggccctgactggaa

SEQ ID NO: 333 - DNA, 146 bp, synthetic construct
  misc_feature 1..146: note = Synthetic
  source 1..146: mol_type = other DNA
ccatggcccaacttgtttattgcagcttataatggttacaaataaagcaatagcatcacaaatttcacaaataaagcatttttttcactgcattctagttgtggtttgtccaaactcatcaatgtatcttatcatgtctggatctc

SEQ ID NO: 334 - DNA, 276 bp, synthetic construct
  misc_feature 1..276: note = Synthetic
  source 1..276: mol_type = other DNA
atccttccagtcagggccatgtttgagagctagaaatagcaagtttaaataaggctagtccgttatcaacttgaaaaagtgggaccgagtcggtccacctgaaccgtatatcgagatccagacatgataagatacattgatgagtttggacaaaccacaactagaatgcagtgaaaaaaatgctttatttgtgaaatttgtgatgctattgctttatttgtaaccattataagctgcaataaacaagttgggccatggctatggccctgactggaa

SEQ ID NO: 335 - DNA, 244 bp, synthetic construct
  misc_feature 1..244: note = Synthetic
  source 1..244: mol_type = other DNA
tgatcataatcaagccatatcacatctgtagaggtttacttgctttaaaaaacctccacacctccccctgaacctgaaacataaaatgaatgcaattgttgttgttaacttgtttattgcagcttataatggttacaaataaagcaatagcatcacaaatttcacaaataaagcatttttttcactgcattctagttgtggtttgtccaaactcatcaatgtatcttatcatgtctggatctgc

SEQ ID NO: 336 - DNA, 374 bp, synthetic construct
  misc_feature 1..374: note = Synthetic
  source 1..374: mol_type = other DNA
atccttccagtcagggccatgtttgagagctagaaatagcaagtttaaataaggctagtccgttatcaacttgaaaaagtgggaccgagtcggtccacctgaaccgtatatcgcagatccagacatgataagatacattgatgagtttggacaaaccacaactagaatgcagtgaaaaaaatgctttatttgtgaaatttgtgatgctattgctttatttgtaaccattataagctgcaataaacaagttaacaacaacaattgcattcattttatgtttcaggttcagggggaggtgtggaggttttttaaagcaagtaaacctctacagatgtgatatggcttgattatgatcactatggccctgactggaa

SEQ ID NO: 337 - DNA, 479 bp, synthetic construct
  misc_feature 1..479: note = Synthetic
  source 1..479: mol_type = other DNA
acgggtggcatccctgtgacccctccccagtgcctctcctggccctggaagttgccactccagtgcccaccagccttgtcctaataaaattaagttgcatcattttgtctgactaggtgtccttctataatattatggggtggaggggggtggtatggagcaaggggcaagttgggaagacaacctgtagggcctgcggggtctattgggaaccaagctggagtgcagtggcacaatcttggctcactgcaatctccgcctcctgggttcaagcgattctcctgcctcagcctcccgagttgttgggattccaggcatgcatgaccaggctcagctaatttttgtttttttggtagagacggggtttcaccatattggccaggctggtctccaactcctaatctcaggtgatctacccaccttggcctcccaaattgctgggattacaggcgtgaaccactgctcccttccctgtcctt

SEQ ID NO: 338 - DNA, 609 bp, synthetic construct
  misc_feature 1..609: note = Synthetic
  source 1..609: mol_type = other DNA
atccttccagtcagggccatgtttgagagctagaaatagcaagtttaaataaggctagtccgttatcaacttgaaaaagtgggaccgagtcggtccacctgaaccgtatatcaaggacagggaagggagcagtggttcacgcctgtaatcccagcaatttgggaggccaaggtgggtagatcacctgagattaggagttggagaccagcctggccaatatggtgaaaccccgtctctaccaaaaaaacaaaaattagctgagcctggtcatgcatgcctggaatcccaacaactcgggaggctgaggcaggagaatcgcttgaacccaggaggcggagattgcagtgagccaagattgtgccactgcactccagcttggttcccaatagaccccgcaggccctacaggttgtcttcccaacttgccccttgctccataccacccccctccaccccataatattatagaaggacacctagtcagacaaaatgatgcaacttaattttattaggacaaggctggtgggcactggagtggcaacttccagggccaggagaggcactggggaggggtcacagggatgccacccgtctatggccctgactggaa

SEQ ID NO: 339 - DNA, 228 bp, synthetic construct
  misc_feature 1..228: note = Synthetic
  source 1..228: mol_type = other DNA
cgactgtgccttctagttgccagccatctgttgtttgcccctcccccgtgccttccttgaccctggaaggtgccactcccactgtcctttcctaataaaatgaggaaattgcatcgcattgtctgagtaggtgtcattctattctggggggtggggtggggcaggacagcaagggggaggattgggaagacaatagcaggcatgctggggatgcggtgggctctatgg

SEQ ID NO: 340 - DNA, 358 bp, synthetic construct
  misc_feature 1..358: note = Synthetic
  source 1..358: mol_type = other DNA
atccttccagtcagggccatgtttgagagctagaaatagcaagtttaaataaggctagtccgttatcaacttgaaaaagtgggaccgagtcggtccacctgaaccgtatatcccatagagcccaccgcatccccagcatgcctgctattgtcttcccaatcctcccccttgctgtcctgccccaccccaccccccagaatagaatgacacctactcagacaatgcgatgcaatttcctcattttattaggaaaggacagtgggagtggcaccttccagggtcaaggaaggcacgggggaggggcaaacaacagatggctggcaactagaaggcacagtcgctatggccctgactggaa

SEQ ID NO: 341 - DNA, 527 bp, synthetic construct
  misc_feature 1..527: note = Synthetic
  source 1..527: mol_type = other DNA
ttcactcctcaggtgcaggctgcctatcagaaggtggtggctggtgtggccaatgccctggctcacaaataccactgagatctttttccctctgccaaaaattatggggacatcatgaagccccttgagcatctgacttctggctaataaaggaaatttattttcattgcaatagtgtgttggaattttttgtgtctctcactcggaaggacatatgggagggcaaatcatttaaaacatcagaatgagtatttggtttagagtttggcaacatatgcccatatgctggctgccatgaacaaaggttggctataaagaggtcatcagtatatgaaacagccccctgctgtccattccttattccatagaaaagccttgacttgaggttagattttttttatattttgttttgtgttatttttttctttaacatccctaaaattttccttacatgttttactagccagatttttcctcctctcctgactactcccagtcatagctgtccctcttctcttatggagatc

SEQ ID NO: 342 - DNA, 657 bp, synthetic construct
  misc_feature 1..657: note = Synthetic
  source 1..657: mol_type = other DNA
atccttccagtcagggccatgtttgagagctagaaatagcaagtttaaataaggctagtccgttatcaacttgaaaaagtgggaccgagtcggtccacctgaaccgtatatcgatctccataagagaagagggacagctatgactgggagtagtcaggagaggaggaaaaatctggctagtaaaacatgtaaggaaaattttagggatgttaaagaaaaaaataacacaaaacaaaatataaaaaaaatctaacctcaagtcaaggcttttctatggaataaggaatggacagcagggggctgtttcatatactgatgacctctttatagccaacctttgttcatggcagccagcatatgggcatatgttgccaaactctaaaccaaatactcattctgatgttttaaatgatttgccctcccatatgtccttccgagtgagagacacaaaaaattccaacacactattgcaatgaaaataaatttcctttattagccagaagtcagatgctcaaggggcttcatgatgtccccataatttttggcagagggaaaaagatctcagtggtatttgtgagccagggcattggccacaccagccaccaccttctgataggcagcctgcacctgaggagtgaactatggccctgactggaa

SEQ ID NO: 343 - DNA, 271 bp, synthetic construct
  misc_feature 1..271: note = Synthetic
  source 1..271: mol_type = other DNA
gggggaggctaactgaaacacggaaggagacaataccggaaggaacccgcgctatgacggcaataaaaagacagaataaaacgcacgggtgttgggtcgtttgttcataaacgcggggttcggtcccagggctggcactctgtcgataccccaccgagaccccattggggccaatacgcccgcgtttcttccttttccccaccccaccccccaagttcgggtgaaggcccagggctcgcagccaacgtcggggcggcaggccctgccatag

SEQ ID NO: 344 - DNA, 401 bp, synthetic construct
  misc_feature 1..401: note = Synthetic
  source 1..401: mol_type = other DNA
atccttccagtcagggccatgtttgagagctagaaatagcaagtttaaataaggctagtccgttatcaacttgaaaaagtgggaccgagtcggtccacctgaaccgtatatcctatggcagggcctgccgccccgacgttggctgcgagccctgggccttcacccgaacttggggggtggggtggggaaaaggaagaaacgcgggcgtattggccccaatggggtctcggtggggtatcgacagagtgccagccctgggaccgaaccccgcgtttatgaacaaacgacccaacacccgtgcgttttattctgtctttttattgccgtcatagcgcgggttccttccggtattgtctccttccgtgtttcagttagcctcccccctatggccctgactggaa

SEQ ID NO: 345 - DNA, 171 bp, synthetic construct
  misc_feature 1..171: note = Synthetic
  source 1..171: mol_type = other DNA
tagggtcatgaaggtttttcttttcctgagaaaacaacacgtattgttttctcaggttttgctttttggcctttttctagcttaaaaaaaaaaaaagcaaaagatgctggtggttggcactcctggtttccaggacggggttcaaatccctgcggcgtctttgctttgact

SEQ ID NO: 346 - DNA, 301 bp, synthetic construct
  misc_feature 1..301: note = Synthetic
  source 1..301: mol_type = other DNA
atccttccagtcagggccatgtttgagagctagaaatagcaagtttaaataaggctagtccgttatcaacttgaaaaagtgggaccgagtcggtccacctgaaccgtatatcagtcaaagcaaagacgccgcagggatttgaaccccgtcctggaaaccaggagtgccaaccaccagcatcttttgctttttttttttttaagctagaaaaaggccaaaaagcaaaacctgagaaaacaatacgtgttgttttctcaggaaaagaaaaaccttcatgaccctactatggccctgactggaa

SEQ ID NO: 347 - DNA, 208 bp, synthetic construct
  misc_feature 1..208: note = Synthetic
  source 1..208: mol_type = other DNA
tgttttggctgggtttttccttgttcgcaccggacacctccagtgaccagacggcaaggtttttatcccagtgtatattggaaaaacatgttatacttttgacaatttaacgtgcctagagctcaaattaaactaataccataacgtaatgcaacttacaacataaataaaggtcaatgtttaatccataaaaaaaaaaaaaaaaaaa

SEQ ID NO: 348 - DNA, 338 bp, synthetic construct
  misc_feature 1..338: note = Synthetic
  source 1..338: mol_type = other DNA
atccttccagtcagggccatgtttgagagctagaaatagcaagtttaaataaggctagtccgttatcaacttgaaaaagtgggaccgagtcggtccacctgaaccgtatatctttttttttttttttttttatggattaaacattgacctttatttatgttgtaagttgcattacgttatggtattagtttaatttgagctctaggcacgttaaattgtcaaaagtataacatgtttttccaatatacactgggataaaaaccttgccgtctggtcactggaggtgtccggtgcgaacaaggaaaaacccagccaaaacactatggccctgactggaa

SEQ ID NO: 349 - DNA, 636 bp, synthetic construct
  misc_feature 1..636: note = Synthetic
  source 1..636: mol_type = other DNA
tgttttggctgggtttttccttgttcgcaccggacacctccagtgaccagacggcaaggtttttatcccagtgtatattggaaaaacatgttatacttttgacaatttaacgtgcctagagctcaaattaaactaataccataacgtaatgcaacttacaacataaataaaggtcaatgtttaatccataaaaaaaaaaaaaaaaaaaacacactgttttggctgggtttttccttgttcgcaccggacacctccagtgaccagacggcaaggtttttatcccagtgtatattggaaaaacatgttatacttttgacaatttaacgtgcctagagctcaaattaaactaataccataacgtaatgcaacttacaacataaataaaggtcaatgtttaatccataaaaaaaaaaaaaaaaaaatctctctgttttggctgggtttttccttgttcgcaccggacacctccagtgaccagacggcaaggtttttatcccagtgtatattggaaaaacatgttatacttttgacaatttaacgtgcctagagctcaaattaaactaataccataacgtaatgcaacttacaacataaataaaggtcaatgtttaatccataaaaaaaaaaaaaaaaaaa

SEQ ID NO: 350 - DNA, 766 bp, synthetic construct
  misc_feature 1..766: note = Synthetic
  source 1..766: mol_type = other DNA
atccttccagtcagggccatgtttgagagctagaaatagcaagtttaaataaggctagtccgttatcaacttgaaaaagtgggaccgagtcggtccacctgaaccgtatatctttttttttttttttttttatggattaaacattgacctttatttatgttgtaagttgcattacgttatggtattagtttaatttgagctctaggcacgttaaattgtcaaaagtataacatgtttttccaatatacactgggataaaaaccttgccgtctggtcactggaggtgtccggtgcgaacaaggaaaaacccagccaaaacagagagatttttttttttttttttttatggattaaacattgacctttatttatgttgtaagttgcattacgttatggtattagtttaatttgagctctaggcacgttaaattgtcaaaagtataacatgtttttccaatatacactgggataaaaaccttgccgtctggtcactggaggtgtccggtgcgaacaaggaaaaacccagccaaaacagtgtgttttttttttttttttttttatggattaaacattgacctttatttatgttgtaagttgcattacgttatggtattagtttaatttgagctctaggcacgttaaattgtcaaaagtataacatgtttttccaatatacactgggataaaaaccttgccgtctggtcactggaggtgtccggtgcgaacaaggaaaaacccagccaaaacactatggccctgactggaa

SEQ ID NO: 351 - DNA, 204 bp, synthetic construct
  misc_feature 1..204: note = Synthetic
  source 1..204: mol_type = other DNA
cagcaagttcagagaaatctgaacttgctggatttttggagcagggagatggaataggagcttgctccgtccactccacgcatcgacctggtattgcagtacctccaggaacggtgcacccactttctggagtttcaaaagtagactgtacgctaagggtcatatctttttttgtttggtttgtgtcttggttggcgtcttaaa

SEQ ID NO: 352 - DNA, 334 bp, synthetic construct
  misc_feature 1..334: note = Synthetic
  source 1..334: mol_type = other DNA
atccttccagtcagggccatgtttgagagctagaaatagcaagtttaaataaggctagtccgttatcaacttgaaaaagtgggaccgagtcggtccacctgaaccgtatatctttaagacgccaaccaagacacaaaccaaacaaaaaaagatatgacccttagcgtacagtctacttttgaaactccagaaagtgggtgcaccgttcctggaggtactgcaataccaggtcgatgcgtggagtggacggagcaagctcctattccatctccctgctccaaaaatccagcaagttcagatttctctgaacttgctgctatggccctgactggaa

SEQ ID NO: 353 - DNA, 73 bp, synthetic construct
  misc_feature 1..73: note = Synthetic
  source 1..73: mol_type = other DNA
gtttcaaaagtagactgtacgctaagggtcatatctttttttgtttggtttgtgtcttggttggcgtcttaaa

SEQ ID NO: 354 - DNA, 203 bp, synthetic construct
  misc_feature 1..203: note = Synthetic
  source 1..203: mol_type = other DNA
atccttccagtcagggccatgtttgagagctagaaatagcaagtttaaataaggctagtccgttatcaacttgaaaaagtgggaccgagtcggtccacctgaaccgtatatctttaagacgccaaccaagacacaaaccaaacaaaaaaagatatgacccttagcgtacagtctacttttgaaacctatggccctgactggaa

SEQ ID NO: 355 - DNA, 73 bp, synthetic construct
  misc_feature 1..73: note = Synthetic
  source 1..73: mol_type = other DNA
gcccggctagctcagtcggtagagcatgagactcttaatctcagggtcgtgggttcgagccccacgttgggcg

SEQ ID NO: 356 - DNA, 203 bp, synthetic construct
  misc_feature 1..203: note = Synthetic
  source 1..203: mol_type = other DNA
atccttccagtcagggccatgtttgagagctagaaatagcaagtttaaataaggctagtccgttatcaacttgaaaaagtgggaccgagtcggtccacctgaaccgtatatccgcccaacgtggggctcgaacccacgaccctgagattaagagtctcatgctctaccgactgagctagccgggcctatggccctgactggaa

SEQ ID NO: 357 - DNA, 49 bp, synthetic construct
  misc_feature 1..49: note = Synthetic
  source 1..49: mol_type = other DNA
gagacggtcgggtccagatattcgtatctgtcgagtagagtgtgggctc

SEQ ID NO: 358 - DNA, 179 bp, synthetic construct
  misc_feature 1..179: note = Synthetic
  source 1..179: mol_type = other DNA
atccttccagtcagggccatgtttgagagctagaaatagcaagtttaaataaggctagtccgttatcaacttgaaaaagtgggaccgagtcggtccacctgaaccgtatatcgagcccacactctactcgacagatacgaatatctggacccgaccgtctcctatggccctgactggaa

SEQ ID NO: 359 - DNA, 98 bp, synthetic construct
  misc_feature 1..98: note = Synthetic
  source 1..98: mol_type = other DNA
gacgcaactgaatgaaatggtgaaggacgggtccaggtgtggctgcttcggcagtgcagcttgttgagtagagtgtgagctccgtaactagtcgcgtc

SEQ ID NO: 360 - DNA, 228 bp, synthetic construct
  misc_feature 1..228: note = Synthetic
  source 1..228: mol_type = other DNA
atccttccagtcagggccatgtttgagagctagaaatagcaagtttaaataaggctagtccgttatcaacttgaaaaagtgggaccgagtcggtccacctgaaccgtatatcgacgcgactagttacggagctcacactctactcaacaagctgcactgccgaagcagccacacctggacccgtccttcaccatttcattcagttgcgtcctatggccctgactggaa

SEQ ID NO: 361 - DNA, 95 bp, synthetic construct
  misc_feature 1..95: note = Synthetic
  source 1..95: mol_type = other DNA
gatgtaactgaatgaaatggtgaaggacgggtccagtaggctgcttcggcagcctacttgttgagtagagtgtgagctccgtaactagttacatc

SEQ ID NO: 362 - DNA, 225 bp, synthetic construct
  misc_feature 1..225: note = Synthetic
  source 1..225: mol_type = other DNA
atccttccagtcagggccatgtttgagagctagaaatagcaagtttaaataaggctagtccgttatcaacttgaaaaagtgggaccgagtcggtccacctgaaccgtatatcgatgtaactagttacggagctcacactctactcaacaagtaggctgccgaagcagcctactggacccgtccttcaccatttcattcagttacatcctatggccctgactggaa

SEQ ID NO: 363 - DNA, 40 bp, synthetic construct
  misc_feature 1..40: note = Synthetic
  source 1..40: mol_type = other DNA
ggcacgtacgaagggacggtgcggagaggagagtacgtgc

SEQ ID NO: 364 - DNA, 170 bp, synthetic construct
  misc_feature 1..170: note = Synthetic
  source 1..170: mol_type = other DNA
atccttccagtcagggccatgtttgagagctagaaatagcaagtttaaataaggctagtccgttatcaacttgaaaaagtgggaccgagtcggtccacctgaaccgtatatcgcacgtactctcctctccgcaccgtcccttcgtacgtgccctatggccctgactggaa

SEQ ID NO: 365 - DNA, 68 bp, synthetic construct
  misc_feature 1..68: note = Synthetic
  source 1..68: mol_type = other DNA
ggccggcatggtcccagcctcctcgctggcgccggctgggcaacatgcttcggcatggcgaatgggac

SEQ ID NO: 366 - DNA, 198 bp, synthetic construct
  misc_feature 1..198: note = Synthetic
  source 1..198: mol_type = other DNA
atccttccagtcagggccatgtttgagagctagaaatagcaagtttaaataaggctagtccgttatcaacttgaaaaagtgggaccgagtcggtccacctgaaccgtatatcgtcccattcgccatgccgaagcatgttgcccagccggcgccagcgaggaggctgggaccatgccggccctatggccctgactggaa

SEQ ID NO: 367 - DNA, 25 bp, synthetic construct
  misc_feature 1..25: note = Synthetic
  source 1..25: mol_type = other DNA
ggactctaggactggactttggact

SEQ ID NO: 368 - DNA, 155 bp, synthetic construct
  misc_feature 1..155: note = Synthetic
  source 1..155: mol_type = other DNA
atccttccagtcagggccatgtttgagagctagaaatagcaagtttaaataaggctagtccgttatcaacttgaaaaagtgggaccgagtcggtccacctgaaccgtatatcagtccaaagtccagtcctagagtccctatggccctgactggaa

SEQ ID NO: 369 - DNA, 1719 bp, synthetic construct
  misc_feature 1..1719: note = Synthetic
  source 1..1719: mol_type = other DNA
gttcgttgcaacaaattgatgagcaatgcttttttataatgccaactttgtacaaaaaagttggcatgacaagttccaggctttggttttcgctgctgctggcggcagcgttcgcaggacgggcgacggccctctggccctggcctcagaacttccaaacctccgaccagcgctacgtcctttacccgaacaactttcaattccagtacgatgtcagctcggccgcgcagcccggctgctcagtcctcgacgaggccttccagcgctatcgtgacctgcttttcggttccgggtcttggccccgtccttacctcacagggaaacggcatacactggagaagaatgtgttggttgtctctgtagtcacacctggatgtaaccagcttcctactttggagtcagtggagaattataccctgaccataaatgatgaccagtgtttactcctctctgagactgtctggggagctctccgaggtctggagacttttagccagcttgtttggaaatctgctgagggcacattctttatcaacaagactgagattgaggactttccccgctttcctcaccggggcttgctgttggatacatctcgccattacctgccactctctagcatcctggacactctggatgtcatggcgtacaataaattgaacgtgttccactggcatctggtagatgatccttccttcccatatgagagcttcacttttccagagctcatgagaaaggggtcctacaaccctgtcacccacatctacacagcacaggatgtgaaggaggtcattgaatacgcacggctccggggtatccgtgtgcttgcagagtttgacactcctggccacactttgtcctggggaccaggtatccctggattactgactccttgctaccctgggtctgagccctctggcacctttggaccagtgaatcccagtctcaataatacctatgagttcatgagcacattcttcttagaagtcagctctgtcttcccagatttttatcttcatcttggaggagatgaggttgatttcacctgctggaagtccaacccagagatccaggactttatgaggaagaaaggcttcggtgaggacttcaagcagctggagtccttctacatccagacgctgctggacatcgtctcttcttatggcaagggctatgtggtgtggcaggaggtgtttgataataaagtaaagattcagccagacacaatcatacaggtgtggcgagaggatattccagtgaactatatgaaggagctggaactggtcaccaaggccggcttccgggcccttctctctgccccctggtacctgaaccgtatatcctatggccctgactggaaggatttctacgtagtggaacccctggcatttgaaggtacccctgagcagaaggctctggtgattggtggagaggcttgtatgtggggagaatatgtggacaacacaaacctggtccccaggctctggcccagagcaggggctgttgccgaaaggctgtggagcaacaagttgacatctgacctgacatttgcctatgaacgtttgtcacacttccgctgtgagttgctgaggcgaggtgtccaggcccaacccctcaatgtaggcttctgtgagcaggagtttgaacagacctgcccaactttcttgtacaaagttggcattataagaaagcattgcttatcaatttgttgcaacgaac

SEQ ID NO: 370 - protein, 529 aa, synthetic construct
  REGION 1..529: note = Synthetic
MTSSRLWFSLLLAAAFAGRATALWPWPQNFQTSDQRYVLYPNNFQFQYDVSSAAQPGCSVLDEAFQRYRDLLFGSGSWPRPYLTGKRHTLEKNVLVVSVVTPGCNQLPTLESVENYTLTINDDQCLLLSETVWGALRGLETFSQLVWKSAEGTFFINKTEIEDFPRFPHRGLLLDTSRHYLPLSSILDTLDVMAYNKLNVFHWHLVDDPSFPYESFTFPELMRKGSYNPVTHIYTAQDVKEVIEYARLRGIRVLAEFDTPGHTLSWGPGIPGLLTPCYPGSEPSGTFGPVNPSLNNTYEFMSTFFLEVSSVFPDFYLHLGGDEVDFTCWKSNPEIQDFMRKKGFGEDFKQLESFYIQTLLDIVSSYGKGYVVWQEVFDNKVKIQPDTIIQVWREDIPVNYMKELELVTKAGFRALLSAPWYLNRISYGPDWKDFYVVEPLAFEGTPEQKALVIGGEACMWGEYVDNTNLVPRLWPRAGAVAERLWSNKLTSDLTFAYERLSHFRCELLRRGVQAQPLNVGFCEQEFEQT

SEQ ID NO: 371 - DNA, 25 bp, synthetic construct
  misc_feature 1..25: note = Synthetic
  misc_feature 1..5: note = n is a, c, g, or t
  source 1..25: mol_type = other DNA
nnnnntcatcctgataaactgcaaa

SEQ ID NO: 372 - DNA, 82 bp, synthetic construct
  misc_feature 1..82: note = Synthetic
  misc_feature 1..5: note = n is a, c, g, or t
  source 1..82: mol_type = other DNA
nnnnncagtttgtacggatgactgatgagtcccaaataggacgaaacgcgcttcggtgcgtctcatcctgataaactgcaaa

SEQ ID NO: 373 - DNA, 333 bp, synthetic construct
  misc_feature 1..333: note = Synthetic
  source 1..333: mol_type = other DNA
acctgaaccgtatatcgacgcaccgaagcgcgtttcgtcctatttgggactcatcaggatatacggttcaggtgatatacggttcaggtgacgcaccgaagcgcgtttcgtcctatttgggactcatcagacctgaaccgtatatcatccttccagtcagggccatgtttgagagctagaaatagcaagtttaaataaggctagtccgttatcaacttgaaaaagtgggaccgagtcggtccacctgaaccgtatatcgacgcaccgaagcgcgtttcgtcctatttgggactcatcaggatatacggttcaggtctatggccctgactggaa

SEQ ID NO: 374 - DNA, 34 bp, synthetic construct
  misc_feature 1..34: note = Synthetic
  source 1..34: mol_type = other DNA
cctgggtcaatccttggggcccagactgagcacg

SEQ ID NO: 375 - DNA, 51 bp, synthetic construct
  misc_feature 1..51: note = Synthetic
  source 1..51: mol_type = other DNA
cctgggtcaatccttggggcccagactgagcacgtgatggcagaggaaagg

SEQ ID NO: 376 - DNA, 51 bp, synthetic construct
  misc_feature 1..51: note = Synthetic
  source 1..51: mol_type = other DNA
cctttcctctgccatcacgtgctcagtctgggccccaaggattgacccagg

SEQ ID NO: 377 - DNA, 17 bp, synthetic construct
  misc_feature 1..17: note = Synthetic
  source 1..17: mol_type = other DNA
tgatggcagaggaaagg

SEQ ID NO: 378 - DNA, 23 bp, synthetic construct
  misc_feature 1..23: note = Synthetic
  source 1..23: mol_type = other DNA
gcaggctttaaaggaaccaattc

SEQ ID NO: 379 - DNA, 43 bp, synthetic construct
  misc_feature 1..43: note = Synthetic
  source 1..43: mol_type = other DNA
gcaggctttaaaggaaccaattccctgggtcaatccttggggc

SEQ ID NO: 380 - DNA, 20 bp, synthetic construct
  misc_feature 1..20: note = Synthetic
  source 1..20: mol_type = other DNA
ctctggaggatctagcggag

SEQ ID NO: 381 - DNA, 40 bp, synthetic construct
  misc_feature 1..40: note = Synthetic
  source 1..40: mol_type = other DNA
ctctggaggatctagcggagtttttttttttttttttttt

SEQ ID NO: 382 - DNA, 34 bp, synthetic construct
  misc_feature 1..34: note = Synthetic
  source 1..34: mol_type = other DNA
ctctggaggatctagcggagcccccccccccccc

SEQ ID NO: 383 - DNA, 20 bp, synthetic construct
  misc_feature 1..20: note = Synthetic
  source 1..20: mol_type = other DNA
ggcccagactgagcacgtga

SEQ ID NO: 384 - DNA, 20 bp, synthetic construct
  misc_feature 1..20: note = Synthetic
  source 1..20: mol_type = other DNA
ggcccagactgagcacgtga

SEQ ID NO: 385 - DNA, 20 bp, synthetic construct
  misc_feature 1..20: note = Synthetic
  source 1..20: mol_type = other DNA
ggcccagactgagcacgtga

SEQ ID NO: 386 - DNA, 20 bp, synthetic construct
  misc_feature 1..20: note = Synthetic
  source 1..20: mol_type = other DNA
ggcccagactgagcacgtga

SEQ ID NO: 387 - DNA, 20 bp, synthetic construct
  misc_feature 1..20: note = Synthetic
  source 1..20: mol_type = other DNA
ggcccagactgagcacgtga

SEQ ID NO: 388 - DNA, 20 bp, synthetic construct
  misc_feature 1..20: note = Synthetic
  source 1..20: mol_type = other DNA
ggcccagactgagcacgtga

SEQ ID NO: 389 - DNA, 20 bp, synthetic construct
  misc_feature 1..20: note = Synthetic
  source 1..20: mol_type = other DNA
ggcccagactgagcacgtga

SEQ ID NO: 390 - DNA, 20 bp, synthetic construct
  misc_feature 1..20: note = Synthetic
  source 1..20: mol_type = other DNA
ggcccagactgagcacgtga

SEQ ID NO: 391 - DNA, 20 bp, synthetic construct
  misc_feature 1..20: note = Synthetic
  source 1..20: mol_type = other DNA
ggcccagactgagcacgtga

SEQ ID NO: 392 - DNA, 20 bp, synthetic construct
  misc_feature 1..20: note = Synthetic
  source 1..20: mol_type = other DNA
ggcccagactgagcacgtga

SEQ ID NO: 393 - DNA, 20 bp, synthetic construct
  misc_feature 1..20: note = Synthetic
  source 1..20: mol_type = other DNA
ggcccagactgagcacgtga

SEQ ID NO: 394 - DNA, 23 bp, synthetic construct
  misc_feature 1..23: note = Synthetic
  source 1..23: mol_type = other DNA
tctgctatcacgtgctcagtctg

SEQ ID NO: 395 - DNA, 20 bp, synthetic construct
  misc_feature 1..20: note = Synthetic
  source 1..20: mol_type = other DNA
gcacatactagcccctgtct

SEQ ID NO: 396 - protein, 15 aa, synthetic construct
  REGION 1..15: note = Synthetic
QYIKANSKFIGITEL

SEQ ID NO: 397 - DNA, 45 bp, synthetic construct
  misc_feature 1..45: note = Synthetic
  source 1..45: mol_type = other DNA
catgatataaaagcaaattctaaatttataggtataactgaacta

SEQ ID NO: 398 - protein, 535 aa, synthetic construct
  REGION 1..535: note = Synthetic
GADDVVDSSKSFVMENFSSYHGTKPGYVDSIQKGIQKPKSGTQGNYDDDWKEFYSTDNKYDAAGYSVDNENPLSGKAGGVVKVTYPGLTKVLALKVDNAETIKKELGLSLTEPLMEQVGTEEFIKRFGDGASRVVLSLPFAEGSSSVEYINNWEQAKALSVELEINFETRGKRGQDAMYEYMAQACAGNRVRRSVGSSLSCINLDWDVIRDKTKTKIESLKEHGPIKNKMSESPNKTVSEEKAKQYLEEFHQTALEHPELSELKTVTGTNPVFAGANYAAWAVNVAQVIDSETADNLEKTTAALSILPGIGSVMGIADGAVHHNTEEIVAQSIALSSLMVAQAIPLVGELVDIGFAAYNFVESIINLFQVVHNSYNRPAYSPGHKTQPFLHDGYAVSWNTVEDSIIRTGFQGESGHDIKITAENTPLPIAGVLLPTIPGKLDVNKSKTHISVNGRKIRMRCRAIDGDVTFCRPKSPVYVGNGVHANLHVAFHRSSSEKIHSNEISSDSIGVLGYQKTVDHTKVNSKLSLFFEIKS

SEQ ID NO: 399 - DNA, 1605 bp, synthetic construct
  misc_feature 1..1605: note = Synthetic
  source 1..1605: mol_type = other DNA
ggcgccgacgacgtggtggacagcagcaagagcttcgtgatggagaacttcagcagctaccacggcaccaagcccggctacgtggacagcatccagaagggcatccagaagcccaagagcggcacccagggcaactacgacgacgactggaaggagttctacagcaccgacaacaagtacgacgccgccggctacagcgtggacaacgagaaccccctgagcggcaaggccggcggcgtggtgaaggtgacctaccccggcctgaccaaggtgctggccctgaaggtggacaacgccgagaccatcaagaaggagctgggcctgagcctgaccgagcccctgatggagcaggtgggcaccgaggagttcatcaagaggttcggcgacggcgccagcagggtggtgctgagcctgcccttcgccgagggcagcagcagcgtggagtacatcaacaactgggagcaggccaaggccctgagcgtggagctggagatcaacttcgagaccaggggcaagaggggccaggacgccatgtacgagtacatggcccaggcctgcgccggcaacagggtgaggaggagcgtgggcagcagcctgagctgcatcaacctggactgggacgtgatcagggacaagaccaagaccaagatcgagagcctgaaggagcacggccccatcaagaacaagatgagcgagagccccaacaagaccgtgagcgaggagaaggccaagcagtacctggaggagttccaccagaccgccctggagcaccccgagctgagcgagctgaagaccgtgaccggcaccaaccccgtgttcgccggcgccaactacgccgcctgggccgtgaacgtggcccaggtgatcgacagcgagaccgccgacaacctggagaagaccaccgccgccctgagcatcctgcccggcatcggcagcgtgatgggcatcgccgacggcgccgtgcaccacaacaccgaggagatcgtggcccagagcatcgccctgagcagcctgatggtggcccaggccatccccctggtgggcgagctggtggacatcggcttcgccgcctacaacttcgtggagagcatcatcaacctgttccaggtggtgcacaacagctacaacaggcccgcctacagccccggccacaagacccagcccttcctgcacgacggctacgccgtgagctggaacaccgtggaggacagcatcatcaggaccggcttccagggcgagagcggccacgacatcaagatcaccgccgagaacacccccctgcccatcgccggcgtgctgctgcccaccatccccggcaagctggacgtgaacaagagcaagacccacatcagcgtgaacggcaggaagatcaggatgaggtgcagggccatcgacggcgacgtgaccttctgcaggcccaagagccccgtgtacgtgggcaacggcgtgcacgccaacctgcacgtggccttccacaggagcagcagcgagaagatccacagcaacgagatcagcagcgacagcatcggcgtgctgggctaccagaagaccgtggaccacaccaaggtgaacagcaagctgagcctgttcttcgagatcaagagc

SEQ ID NO: 400 - protein, 15 aa, synthetic construct
  REGION 1..15: note = Synthetic
GTYRLIPNARANLTA

SEQ ID NO: 401 - DNA, 45 bp, synthetic construct
  misc_feature 1..45: note = Synthetic
  source 1..45: mol_type = other DNA
ggcacctacaggctgatccccaacgccagggccaacctgaccgcc

SEQ ID NO: 402 - protein, 21 aa, synthetic construct
  REGION 1..21: note = Synthetic
PSKFFTISDSATFAPGPVSNA

SEQ ID NO: 403 - DNA, 63 bp, synthetic construct
  misc_feature 1..63: note = Synthetic
  source 1..63: mol_type = other DNA
ccgagcaaattttttaccattagcgatagcgcgacctttgcgccgggcccggtgagcaacgcg

SEQ ID NO: 404 - protein, 21 aa, synthetic construct
  REGION 1..21: note = Synthetic
PSKLFIMLDNATFAPGPVVNA

SEQ ID NO: 405 - DNA, 63 bp, synthetic construct
  misc_feature 1..63: note = Synthetic
  source 1..63: mol_type = other DNA
ccgagcaaactgtttattatgctggataacgcgacctttgcgccgggcccggtggtgaacgcg

SEQ ID NO: 406 - protein, 27 aa, synthetic construct
  REGION 1..27: note = Synthetic
TPPPYQVSCGGESDRASARVIDPAAQS

SEQ ID NO: 407 - DNA, 81 bp, synthetic construct
  misc_feature 1..81: note = Synthetic
  source 1..81: mol_type = other DNA
accccccccccctaccaggtgagctgcggcggcgagagcgacagggccagcgccagggtgatcgaccccgccgcccagagc

SEQ ID NO: 408 - protein, 134 aa, synthetic construct
  REGION 1..134: note = Synthetic
PEYAYKIVKNKKMEDGFLQGMVDGWYGHHSNEQGSGLMENERTLDKANPNNDLCSWSDHEASSNNTNQEDLLQRESRRKKRIGTSTLNQRGNCNTKCQTEEARLKREEVSLVKSDQCSNGSLQCRANNSTEQVD

SEQ ID NO: 409 - DNA, 402 bp, synthetic construct
  misc_feature 1..402: note = Synthetic
  source 1..402: mol_type = other DNA
cccgagtacgcctacaagatcgtgaagaacaagaagatggaggacggcttcctgcagggcatggtggacggctggtacggccaccacagcaacgagcagggcagcggcctgatggagaacgagaggaccctggacaaggccaaccccaacaacgacctgtgcagctggagcgaccacgaggccagcagcaacaacaccaaccaggaggacctgctgcagagggagagcaggaggaagaagaggatcggcaccagcaccctgaaccagaggggcaactgcaacaccaagtgccagaccgaggaggccaggctgaagagggaggaggtgagcctggtgaagagcgaccagtgcagcaacggcagcctgcagtgcagggccaacaacagcaccgagcaggtggac

SEQ ID NO: 410 - protein, 154 aa, synthetic construct
  REGION 1..154: note = Synthetic
TKSTNSRSGGISGPDNEAPVGEAPSPYGDNPRPNDGNNIRIGSKGYNGIITDTIEESCSCYPDAKVVKSVELDSTIWTSGSSPNQKIITIGWDPNGWTGTPMSPNGAYGTDGPSNGQANQHQAESISAGNSSLCPIRDNWHGSNRSWSWPDGAE

SEQ ID NO: 411 - DNA, 462 bp, synthetic construct
  misc_feature 1..462: note = Synthetic
  source 1..462: mol_type = other DNA
accaagagcaccaacagcaggagcggcggcatcagcggccccgacaacgaggcccccgtgggcgaggcccccagcccctacggcgacaaccccaggcccaacgacggcaacaacatcaggatcggcagcaagggctacaacggcatcatcaccgacaccatcgaggagagctgcagctgctaccccgacgccaaggtggtgaagagcgtggagctggacagcaccatctggaccagcggcagcagccccaaccagaagatcatcaccatcggctgggaccccaacggctggaccggcacccccatgagccccaacggcgcctacggcaccgacggccccagcaacggccaggccaaccagcaccaggccgagagcatcagcgccggcaacagcagcctgtgccccatcagggacaactggcacggcagcaacaggagctggagctggcccgacggcgccgag

SEQ ID NO: 412 - protein, 45 aa, synthetic construct
  REGION 1..45: note = Synthetic
EKIVLLLAMMEKIVLLLAKCQTPMGAIKAVDGVTNKCPYLGSPSF

SEQ ID NO: 413 - DNA, 135 bp, synthetic construct
  misc_feature 1..135: note = Synthetic
  source 1..135: mol_type = other DNA
gagaagatcgtgctgctgctggccatgatggagaagatcgtgctgctgctggccaagtgccagacccccatgggcgccatcaaggccgtggacggcgtgaccaacaagtgcccctacctgggcagccccagcttc

SEQ ID NO: 414 - protein, 36 aa, synthetic construct
  REGION 1..36: note = Synthetic
IRPCFWVELNPNQKIITIRPCFWVELICYPDAGEIT

SEQ ID NO: 415 - DNA, 108 bp, synthetic construct
  misc_feature 1..108: note = Synthetic
  source 1..108: mol_type = other DNA
atcaggccctgcttctgggtggagctgaaccccaaccagaagatcatcaccatcaggccctgcttctgggtggagctgatctgctaccccgacgccggcgagatcacc

SEQ ID NO: 416 - protein, 45 aa, synthetic construct
  REGION 1..45: note = Synthetic
MEKIVLLLAEKIVLLLAMCPYLGSPSFKCQTPMGAIKAVDGVTNK

SEQ ID NO: 417 - DNA, 135 bp, synthetic construct
  misc_feature 1..135: note = Synthetic
  source 1..135: mol_type = other DNA
atggagaagatcgtgctgctgctggccgagaagatcgtgctgctgctggccatgtgcccctacctgggcagccccagcttcaagtgccagacccccatgggcgccatcaaggccgtggacggcgtgaccaacaag

SEQ ID NO: 418 - protein, 36 aa, synthetic construct
  REGION 1..36: note = Synthetic
NPNQKIITICYPDAGEITIRPCFWVELRPCFWVELI

SEQ ID NO: 419 - DNA, 108 bp, synthetic construct
  misc_feature 1..108: note = Synthetic
  source 1..108: mol_type = other DNA
aaccccaaccagaagatcatcaccatctgctaccccgacgccggcgagatcaccatcaggccctgcttctgggtggagctgaggccctgcttctgggtggagctgatc

SEQ ID NO: 420 - protein, 18 aa, synthetic construct
  REGION 1..18: note = Synthetic
MVSLVKSDQIGTSTLNQR

SEQ ID NO: 421 - DNA, 54 bp, synthetic construct
  misc_feature 1..54: note = Synthetic
  source 1..54: mol_type = other DNA
atggtgagcctggtgaagagcgaccagatcggcaccagcaccctgaaccagagg

SEQ ID NO: 422 - protein, 9 aa, synthetic construct
  REGION 1..9: note = Synthetic
YNGIITDTI

SEQ ID NO: 423 - DNA, 27 bp, synthetic construct
  misc_feature 1..27: note = Synthetic
  source 1..27: mol_type = other DNA
tacaacggcatcatcaccgacaccatc

SEQ ID NO: 424 - protein, 63 aa, synthetic construct
  REGION 1..63: note = Synthetic
MEKIVLLLAEKIVLLLAMMVSLVKSDQCPYLGSPSFIGTSTLNQRKCQTPMGAIKAVDGVTNK

SEQ ID NO: 425 - DNA, 135 bp, synthetic construct
  misc_feature 1..135: note = Synthetic
  source 1..135: mol_type = other DNA
atggagaagatcgtgctgctgctggccgagaagatcgtgctgctgctggccatgatggtgagcctggtgaagagcgaccagtgcccctacctgggcagccccagcttcatcggcaccagcaccctgaaccagagg

SEQ ID NO: 426 - protein, 45 aa, synthetic construct
  REGION 1..45: note = Synthetic
NPNQKIITIYNGIITDTICYPDAGEITIRPCFWVELRPCFWVELI

SEQ ID NO: 427 - DNA, 135 bp, synthetic construct
  misc_feature 1..135: note = Synthetic
  source 1..135: mol_type = other DNA
aaccccaaccagaagatcatcaccatctacaacggcatcatcaccgacaccatctgctaccccgacgccggcgagatcaccatcaggccctgcttctgggtggagctgaggccctgcttctgggtggagctgatc

SEQ ID NO: 428 - protein, 535 aa, synthetic construct; identical to SEQ ID NO: 398
  REGION 1..535: note = Synthetic

SEQ ID NO: 429 - DNA, 27 bp, synthetic construct
  misc_feature 1..27: note = Synthetic
  source 1..27: mol_type = other DNA
ggctaaccgtgccatttgatcaggtca

SEQ ID NO: 430 - DNA, 27 bp, synthetic construct
  misc_feature 1..27: note = Synthetic
  source 1..27: mol_type = other DNA
ggctaaccgtgcaaattaacaaactaa

SEQ ID NO: 431 - DNA, 28 bp, synthetic construct
  misc_feature 1..28: note = Synthetic
  source 1..28: mol_type = other DNA
ggccatctcgtgcaaattaacaaactaa

SEQ ID NO: 432 - DNA, 35 bp, synthetic construct
  misc_feature 1..35: note = Synthetic
  source 1..35: mol_type = other DNA
ggtcctctgccatctcgtgcaaattaacaaactaa

SEQ ID NO: 433 - DNA, 42 bp, synthetic construct
  misc_feature 1..42: note = Synthetic
  source 1..42: mol_type = other DNA
ggcttcctttcctctgccatctcgtgcaaattaacaaactaa

SEQ ID NO: 434 - DNA, 27 bp, synthetic construct
  misc_feature 1..27: note = Synthetic
  source 1..27: mol_type = other DNA
ggctaaccgtgccatttgatcaggtca

SEQ ID NO: 435 - DNA, 27 bp, synthetic construct
  misc_feature 1..27: note = Synthetic
  source 1..27: mol_type = other DNA
ggctaaccgtgcaaattaacaaactaa

SEQ ID NO: 436 - DNA, 28 bp, synthetic construct
  misc_feature 1..28: note = Synthetic
  source 1..28: mol_type = other DNA
ggccatctcgtgcaaattaacaaactaa

SEQ ID NO: 437 - DNA, 35 bp, synthetic construct; identical to SEQ ID NO: 432
  misc_feature 1..35: note = Synthetic
  source 1..35: mol_type = other DNA

SEQ ID NO: 438 - DNA, 42 bp, synthetic construct; identical to SEQ ID NO: 433
  misc_feature 1..42: note = Synthetic
  source 1..42: mol_type = other DNA

SEQ ID NO: 439 - DNA, 17 bp, synthetic construct
  misc_feature 1..17: note = Synthetic
  source 1..17: mol_type = other DNA
tctgccatctcgtgctc

SEQ ID NO: 440 - DNA, 17 bp, synthetic construct
  misc_feature 1..17: note = Synthetic
  source 1..17: mol_type = other DNA
tctgccatctcgtgctc

SEQ ID NO: 441 - DNA, 18 bp, synthetic construct
  misc_feature 1..18: note = Synthetic
  source 1..18: mol_type = other DNA
tctgccatcatcgtgctc

SEQ ID NO: 442 - DNA, 16 bp, synthetic construct
  misc_feature 1..16: note = Synthetic
  source 1..16: mol_type = other DNA
tctgccatccgtgctc

SEQ ID NO: 443 - protein, 1517 aa, Streptococcus pyogenes
MKRTADGSEFESPKKKRKVDKKYSIGLDIGTNSVGWAVITDEYKVPSKKFKVLGNTDRHSIKKNLIGALLFDSGETAEATRLKRTARRRYTRRKNRICYLQEIFSNEMAKVDDSFFHRLEESFLVEEDKKHERHPIFGNIVDEVAYHEKYPTIYHLRKKLVDSTDKADLRLIYLALAHMIKFRGHFLIEGDLNPDNSDVDKLFIQLVQTYNQLFEENPINASGVDAKAILSARLSKSRRLENLIAQLPGEKKNGLFGNLIALSLGLTPNFKSNFDLAEDAKLQLSKDTYDDDLDNLLAQIGDQYADLFLAAKNLSDAILLSDILRVNTEITKAPLSASMIKRYDEHHQDLTLLKALVRQQLPEKYKEIFFDQSKNGYAGYIDGGASQEEFYKFIKPILEKMDGTEELLVKLNREDLLRKQRTFDNGSIPHQIHLGELHAILRRQEDFYPFLKDNREKIEKILTFRIPYYVGPLARGNSRFAWMTRKSEETITPWNFEEVVDKGASAQSFIERMTNFDKNLPNEKVLPKHSLLYEYFTVYNELTKVKYVTEGMRKPAFLSGEQKKAIVDLLFKTNRKVTVKQLKEDYFKKIECFDSVEISGVEDRFNASLGTYHDLLKIIKDKDFLDNEENEDILEDIVLTLTLFEDREMIEERLKTYAHLFDDKVMKQLKRRRYTGWGRLSRKLINGIRDKQSGKTILDFLKSDGFANRNFMQLIHDDSLTFKEDIQKAQVSGQGDSLHEHIANLAGSPAIKKGILQTVKVVDELVKVMGRHKPENIVIEMARENQTTQKGQKNSRERMKRIEEGIKELGSQILKEHPVENTQLQNEKLYLYYLQNGRDMYVDQELDINRLSDYDVDAIVPQSFLKDDSIDNKVLTRSDKNRGKSDNVPSEEVVKKMKNYWRQLLNAKLITQRKFDNLTKAERGGLSELDKAGFIKRQLVETRQITKHVAQILDSRMNTKYDENDKLIREVKVITLKSKLVSDFRKDFQFYKVREINNYHHAHDAYLNAVVGTALIKKYPKLESEFVYGDYKVYDVRKMIAKSEQEIGKATAKYFFYSNIMNFFKTEITLANGEIRKRPLIETNGETGEIVWDKGRDFATVRKVLSMPQVNIVKKTEVQTGGFSKESILPKRNSDKLIARKKDWDPKKYGGFDSPTVAYSVLVVAKVEKGKSKKLKSVKELLGITIMERSSFEKNPIDFLEAKGYKEVKKDLIIKLPKYSLFELENGRKRMLASAGELQKGNELALPSKYVNFLYLASHYEKLKGSPEDNEQKQLFVEQHKHYLDEIIEQISEFSKRVILADANLDKVLSAYNKHRDKPIREQAENIIHLFTLTNLGAPAAFKYFDTTIDRKRYTSTKEVLDATLIHQSITGLYETRIDLSQLGGDSGGSSGGSCLSYETEILTVEYGLLPIGKIVEKRIECTVYSVDNNGNIYTQPVAQWHDRGEQEVFEYCLEDGSLIRATKDHKFMTVDGQMLPIDEIFERELDLMRVDNLPNSGGSKRTADGSEFEPKKKRKV

SEQ ID NO: 444 - skipped

SEQ ID NO: 445 - protein, 1367 aa, Streptococcus pyogenes; identical to SEQ ID NO: 55

SEQ ID NO: 446 - protein, 8 aa, synthetic construct
  REGION 1..8: note = Synthetic
SGGSSGGS

SEQ ID NO: 447 - protein, 106 aa, synthetic construct
  REGION 1..106: note = Synthetic
CLSYETEILTVEYGLLPIGKIVEKRIECTVYSVDNNGNIYTQPVAQWHDRGEQEVFEYCLEDGSLIRATKDHKFMTVDGQMLPIDEIFERELDLMRVDNLPNSGGS

SEQ ID NO: 448-449 - skipped (2 entries)

SEQ ID NO: 450 - protein, 780 aa, unidentified
  source 1..780: note = Staphylococcus pyogenes
MKRTADGSEFESPKKKRKVIKIATRKYLGKQNVYDIGVERDHNFALKNGFIASNCFNSGSETPGTSESATPESSGGSSGGSSTLNIEDEYRLHETSKEPDVSLGSTWLSDFPQAWAETGGMGLAVRQAPLIIPLKATSTPVSIKQYPMSQEARLGIKPHIQRLLDQGILVPCQSPWNTPLLPVKKPGTNDYRPVQDLREVNKRVEDIHPTVPNPYNLLSGLPPSHQWYTVLDLKDAFFCLRLHPTSQPLFAFEWRDPEMGISGQLTWTRLPQGFKNSPTLFDEALHRDLADFRIQHPDLILLQYVDDLLLAATSELDCQQGTRALLQTLGNLGYRASAKKAQICQKQVKYLGYLLKEGQRWLTEARKETVMGQPTPKTPRQLREFLGTAGFCRLWIPGFAEMAAPLYPLTKTGTLFNWGPDQQKAYQEIKQALLTAPALGLPDLTKPFELFVDEKQGYAKGVLTQKLGPWRRPVAYLSKKLDPVAAGWPPCLRMVAAIAVLTKDAGKLTMGQPLVILAPHAVEALVKQPPDRWLSNARMTHYQALLLDTDRVQFGPVVALNPATLLPLPEEGLQHNCLDILAEAHGTRPDLTDQPLPDADHTWYTDGSSLLQEGQRKAGAAVTTETEVIWAKALPAGTSAQRAELIALTQALKMAEGKKLNVYTDSRYAFATAHIHGEIYRRRGLLTSEGKEIKNKDEILALLKALFLPKRLSIIHCPGHQKGHSAEARGNRMADQAARKAAITETPDTSTLLIENSSPSGGSKRTADGSEFEPKKKRKV

SEQ ID NO: 451 - skipped

SEQ ID NO: 452 - protein, 35 aa, synthetic construct
  REGION 1..35: note = Synthetic
IKIATRKYLGKQNVYDIGVERDHNFALKNGFIASN

SEQ ID NO: 453 - protein, 28 aa, synthetic construct
  REGION 1..28: note = Synthetic
CFNSGSETPGTSESATPESSGGSSGGSS

SEQ ID NO: 454 - protein, 677 aa, unidentified; identical to SEQ ID NO: 89
  REGION 1..677: note = moloney murine leukemia virus

SEQ ID NO: 455 - DNA, 21 bp, synthetic construct
  misc_feature 1..21: note = Synthetic
  source 1..21: mol_type = other DNA
gtgccatcacgtgctcagtct

SEQ ID NO: 456 - DNA, 21 bp, synthetic construct
  misc_feature 1..21: note = Synthetic
  source 1..21: mol_type = other DNA
gagcgatccaggtgctgcaga

SEQ ID NO: 457 - DNA, 20 bp, synthetic construct
  misc_feature 1..20: note = Synthetic
  source 1..20: mol_type = other DNA
ggagcccttcttcttctgct

SEQ ID NO: 458 - protein, 881 aa, Staphylococcus aureus
MKRTADGSEFESPKKKRKVGKRNYILGLAIGITSVGYGIIDYETRDVIDAGVRLFKEANVENNEGRRSKRGARRLKRRRRHRIQRVKKLLFDYNLLTDHSELSGINPYEARVKGLSQKLSEEEFSAALLHLAKRRGVHNVNEVEEDTGNELSTKEQISRNSKALEEKYVAELQLERLKKDGEVRGSINRFKTSDYVKEAKQLLKVQKAYHQLDQSFIDTYIDLLETRRTYYEGPGEGSPFGWKDIKEWYEMLMGHCTYFPEELRSVKYAYNADLYNALNDLNNLVITRDENEKLEYYEKFQIIENVFKQKKKPTLKQIAKEILVNEEDIKGYRVTSTGKPEFTNLKVYHDIKDITARKEIIENAELLDQIAKILTIYQSSEDIQEELTNLNSELTQEEIEQISNLKGYTGTHNLSLKAINLILDELWHTNDNQIAIFNRLKLVPKKVDLSQQKEIPTTLVDDFILSPVVKRSFIQSIKVINAIIKKYGLPNDIIIELAREKNSKDAQKMINEMQKRNRQTNERIEEIIRTTGKENAKYLIEKIKLHDMQEGKCLYSLEAIPLEDLLNNPFNYEVDHIIPRSVSFDNSFNNKVLVKQEENSKKGNRTPFQYLSSSDSKISYETFKKHILNLAKGKGRISKTKKEYLLEERDINRFSVQKDFINRNLVDTRYATRGLMNLLRSYFRVNNLDVKVKSINGGFTSFLRRKWKFKKERNKGYKHHAEDALIIANADFIFKEWKKLDKAKKVMENQMFEEKQAECLSYETEILTVEYGLLPIGKIVEKRIECTVYSVDNNGNIYTQPVAQWHDRGEQEVFEYCLEDGSLIRATKDHKFMTVDGQMLPIDEIFERELDLMRVDNLPNSGGSKRTADGSEFEPKKKRKV

SEQ ID NO: 459 - skipped

SEQ ID NO: 460 - protein, 739 aa, synthetic construct
  REGION 1..739: note = Synthetic
GKRNYILGLAIGITSVGYGIIDYETRDVIDAGVRLFKEANVENNEGRRSKRGARRLKRRRRHRIQRVKKLLFDYNLLTDHSELSGINPYEARVKGLSQKLSEEEFSAALLHLAKRRGVHNVNEVEEDTGNELSTKEQISRNSKALEEKYVAELQLERLKKDGEVRGSINRFKTSDYVKEAKQLLKVQKAYHQLDQSFIDTYIDLLETRRTYYEGPGEGSPFGWKDIKEWYEMLMGHCTYFPEELRSVKYAYNADLYNALNDLNNLVITRDENEKLEYYEKFQIIENVFKQKKKPTLKQIAKEILVNEEDIKGYRVTSTGKPEFTNLKVYHDIKDITARKEIIENAELLDQIAKILTIYQSSEDIQEELTNLNSELTQEEIEQISNLKGYTGTHNLSLKAINLILDELWHTNDNQIAIFNRLKLVPKKVDLSQQKEIPTTLVDDFILSPVVKRSFIQSIKVINAIIKKYGLPNDIIIELAREKNSKDAQKMINEMQKRNRQTNERIEEIIRTTGKENAKYLIEKIKLHDMQEGKCLYSLEAIPLEDLLNNPFNYEVDHIIPRSVSFDNSFNNKVLVKQEENSKKGNRTPFQYLSSSDSKISYETFKKHILNLAKGKGRISKTKKEYLLEERDINRFSVQKDFINRNLVDTRYATRGLMNLLRSYFRVNNLDVKVKSINGGFTSFLRRKWKFKKERNKGYKHHAEDALIIANADFIFKEWKKLDKAKKVMENQMFEEKQAE

SEQ ID NO: 461 - skipped

SEQ ID NO: 462 - protein, 102 aa, synthetic construct
  REGION 1..102: note = Synthetic
CLSYETEILTVEYGLLPIGKIVEKRIECTVYSVDNNGNIYTQPVAQWHDRGEQEVFEYCLEDGSLIRATKDHKFMTVDGQMLPIDEIFERELDLMRVDNLPN

SEQ ID NO: 463-464 - skipped (2 entries)

SEQ ID NO: 465 - protein, 1099 aa, Staphylococcus aureus
MKRTADGSEFESPKKKRKVIKIATRKYLGKQNVYDIGVERDHNFALKNGFIASNCFNEIETEQEYKEIFITPHQIKHIKDFKDYKYSHRVDKKPNRKLINDTLYSTRKDDKGNTLIVNNLNGLYDKDNDKLKKLINKSPEKLLMYHHDPQTYQKLKLIMEQYGDEKNPLYKYYEETGNYLTKYSKKDNGPVIKKIKYYGNKLNAHLDITDDYPNSRNKVVKLSLKPYRFDVYLDNGVYKFVTVKNLDVIKKENYYEVNSKCYEEAKKLKKISNQAEFIASFYKNDLIKINGELYRVIGVNNDLLNRIEVNMIDITYREYLENMNDKRPPHIIKTIASKTQSIKKYSTDILGNLYEVKSKKHPQIIKKGSGGSSGGSSGSETPGTSESATPESSGGSSGGSSTLNIEDEYRLHETSKEPDVSLGSTWLSDFPQAWAETGGMGLAVRQAPLIIPLKATSTPVSIKQYPMSQEARLGIKPHIQRLLDQGILVPCQSPWNTPLLPVKKPGTNDYRPVQDLREVNKRVEDIHPTVPNPYNLLSGLPPSHQWYTVLDLKDAFFCLRLHPTSQPLFAFEWRDPEMGISGQLTWTRLPQGFKNSPTLFDEALHRDLADFRIQHPDLILLQYVDDLLLAATSELDCQQGTRALLQTLGNLGYRASAKKAQICQKQVKYLGYLLKEGQRWLTEARKETVMGQPTPKTPRQLREFLGTAGFCRLWIPGFAEMAAPLYPLTKTGTLFNWGPDQQKAYQEIKQALLTAPALGLPDLTKPFELFVDEKQGYAKGVLTQKLGPWRRPVAYLSKKLDPVAAGWPPCLRMVAAIAVLTKDAGKLTMGQPLVILAPHAVEALVKQPPDRWLSNARMTHYQALLLDTDRVQFGPVVALNPATLLPLPEEGLQHNCLDILAEAHGTRPDLTDQPLPDADHTWYTDGSSLLQEGQRKAGAAVTTETEVIWAKALPAGTSAQRAELIALTQALKMAEGKKLNVYTDSRYAFATAHIHGEIYRRRGLLTSEGKEIKNKDEILALLKALFLPKRLSIIHCPGHQKGHSAEARGNRMADQAARKAAITETPDTSTLLIENSSPSGGSKRTADGSEFEPKKKRKV

SEQ ID NO: 466 - skipped

SEQ ID NO: 467 - protein, 311 aa, synthetic construct
  REGION 1..311: note = Synthetic
EIETEQEYKEIFITPHQIKHIKDFKDYKYSHRVDKKPNRKLINDTLYSTRKDDKGNTLIVNNLNGLYDKDNDKLKKLINKSPEKLLMYHHDPQTYQKLKLIMEQYGDEKNPLYKYYEETGNYLTKYSKKDNGPVIKKIKYYGNKLNAHLDITDDYPNSRNKVVKLSLKPYRFDVYLDNGVYKFVTVKNLDVIKKENYYEVNSKCYEEAKKLKKISNQAEFIASFYKNDLIKINGELYRVIGVNNDLLNRIEVNMIDITYREYLENMNDKRPPHIIKTIASKTQSIKKYSTDILGNLYEVKSKKHPQIIKKG

SEQ ID NO: 468-470 - skipped (3 entries)

SEQ ID NO: 471 - protein, 677 aa, unidentified; identical to SEQ ID NO: 89
  REGION 1..677: note = moloney murine leukemia virus

SEQ ID NO: 472 - protein, 413 aa, synthetic construct; identical to SEQ ID NO: 8
  REGION 1..413: note = Synthetic

SEQ ID NO: 473 - protein, 413 aa, synthetic construct; identical to SEQ ID NO: 9
  REGION 1..413: note = Synthetic

SEQ ID NO: 474 - protein, 413 aa, synthetic construct; identical to SEQ ID NO: 10
  REGION 1..413: note = Synthetic

SEQ ID NO: 475 - protein, 413 aa, synthetic construct; identical to SEQ ID NO: 11
  REGION 1..413: note = Synthetic

SEQ ID NO: 476 - protein, 413 aa, synthetic construct; identical to SEQ ID NO: 12
  REGION 1..413: note = Synthetic

SEQ ID NO: 477 - protein, 413 aa, synthetic construct; identical to SEQ ID NO: 13
  REGION 1..413: note = Synthetic

SEQ ID NO: 478 - protein, 413 aa, synthetic construct; identical to SEQ ID NO: 14
  REGION 1..413: note = Synthetic

SEQ ID NO: 479 - protein, 413 aa, synthetic construct; identical to SEQ ID NO: 15
  REGION 1..413: note = Synthetic

SEQ ID NO: 480-481 - skipped (2 entries)

SEQ ID NO: 482 - protein, 1368 aa, Streptococcus pyogenes [sequence omitted]

SEQ ID NO: 483 - DNA, 4104 bp, Streptococcus pyogenes; identical to SEQ ID NO: 19
  source 1..4104: mol_type = genomic DNA

SEQ ID NO: 484 - DNA, 4104 bp, Streptococcus pyogenes; identical to SEQ ID NO: 20
  source 1..4104: mol_type = genomic DNA

SEQ ID NO: 485 - protein, 1367 aa, Streptococcus pyogenes; identical to SEQ ID NO: 21

SEQ ID NO: 486 - DNA, 4212 bp, Streptococcus pyogenes; identical to SEQ ID NO: 22
  source 1..4212: mol_type = genomic DNA

SEQ ID NO: 487 - protein, 240 aa, Homo sapiens
MANLGCWMLVLFVATWSDLGLCKKRPKPGGWNTGGSRYPGQGSPGGNRYPPQGGGGWGQPHGGGWGQPHGGGWGQPHGGGWGQPHGGGWGQGGGTHSQWNKPSKPKTNMKHMAGAAAAGAVVGGLGGYMLGSAMSRPIIHFGSDYEDRYYRENMHRYPNQVYYRPMDEYSNQNNFVHDCVNITIKQHTVTTTTKGENFTETDVKMMERVVEQMCITQYERESQAYYQRGSSMVLFSSPPV

SEQ ID NO: 488 - protein, 108 aa, synthetic construct
  REGION 1..108: note = Synthetic
MGVQVETISPGDGRTFPKRGQTCVVHYTGMLEDGKKFDSSRDRNKPFKFMLGKQEVIRGWEEGVAQMSVGQRAKLTISPDYAYGATGHPGIIPPHATLVFDVELLKLE

SEQ ID NO: 489 - protein, 108 aa, synthetic construct
  REGION 1..108: note = Synthetic
MGVQVETISPGDGRTFPKRGQTCVVHYTGMLEDGKKVDSSRDRNKPFKFMLGKQEVIRGWEEGVAQMSVGQRAKLTISPDYAYGATGHPGIIPPHATLVFDVELLKLE

SEQ ID NO: 490 - protein, 165 aa, synthetic construct
  REGION 1..165: note = Synthetic
MVNPTVFFDIAVDGEPLGRVSFELFADKVPKTAENFRALSTGEKGFGYKGSCFHRIIPGFMCQGGDFTRHNGTGGKSIYGEKFEDENFILKHTGPGILSMANAGPNTNGSQFFICTAKTEWLDGKHVVFGKVKEGMNIVEAMERFGSRNGKTSKKITIADCGQLE

SEQ ID NO: 491 - protein, 108 aa, synthetic construct; identical to SEQ ID NO: 488
  REGION 1..108: note = Synthetic

SEQ ID NO: 492 - skipped

SEQ ID NO: 493 - protein, 216 aa, Homo sapiens
MLRLSERNMKVLLAAALIAGSVFFLLLPGPSAADEKKKGPKVTVKVYFDLRIGDEDVGRVIFGLFGKTVPKTVDNFVALATGEKGFGYKNSKFHRVIKDFMIQGGDFTRGDGTGGKSIYGERFPDENFKLKHYGPGWVSMANAGKDTNGSQFFITTVKTAWLDGKHVVFGKVLEGMEVVRKVESTKTDSRDKPLKDVIIADCGKIEVEKPFAIAKE

SEQ ID NO: 494 - protein, 212 aa, Mus musculus
MSPGPRLLLPAVLCLGLGALVSSSGSSGVRKRGPSVTDKVFFDVRIGDKDVGRIVIGLFGNVVPKTVENFVALATGEKGYGYKGSIFHRVIKDFMIQGGDFTARDGTGGMSIYGETFPDENFKLKHYGIGWVSMANAGPDTNGSQFFITLTKPTWLDGKHVVFGKVLDGMTVVHSIELQATDGHDRPLTDCTIVNSGKIDVKTPFVVEVPDW

SEQ ID NO: 495 - protein, 108 aa, synthetic construct; identical to SEQ ID NO: 489
  REGION 1..108: note = Synthetic

SEQ ID NO: 496 - protein, 187 aa, Homo sapiens
MVGSLNCIVAVSQNMGIGKNGDLPWPPLRNEFRYFQRMTTTSSVEGKQNLVIMGKKTWFSIPEKNRPLKGRINLVLSRELKEPPQGAHFLSRSLDDALKLTEQPELANKVDMVWIVGGSSVYKEAMNHPGHLKLFVTRIMQDFESDTFFPEIDLEKYKLLPEYPGVLSDVQEEKGIKYKFEVYEKND

SEQ ID NO: 497 - protein, 159 aa, Escherichia coli [sequence omitted]

SEQ ID NO: 498 - protein, 777 aa, Homo sapiens
MDSKESLTPGREENPSSVLAQERGDVMDFYKTLRGGATVKVSASSPSLAVASQSDSKQRRLLVDFPKGSVSNAQQPDLSKAVSLSMGLYMGETETKVMGNDLGFPQQGQISLSSGETDLKLLEESIANLNRSTSVPENPKSSASTAVSAAPTEKEFPKTHSDVSSEQQHLKGQTGTNGGNVKLYTTDQSTFDILQDLEFSSGSPGKETNESPWRSDLLIDENCLLSPLAGEDDSFLLEGNSNEDCKPLILPDTKPKIKDNGDLVLSSPSNVTLPQVKTEKEDFIELCTPGVIKQEKLGTVYCQASFPGANIIGNKMSAISVHGVSTSGGQMYHYDMNTASLSQQQDQKPIFNVIPPIPVGSENWNRCQGSGDDNLTSLGTLNFPGRTVFSNGYSSPSMRPDVSSPPSSSSTATTGPPPKLCLVCSDEASGCHYGVLTCGSCKVFFKRAVEGQHNYLCAGRNDCIIDKIRRKNCPACRYRKCLQAGMNLEARKTKKKIKGIQQATTGVSQETSENPGNKTIVPATLPQLTPTLVSLLEVIEPEVLYAGYDSSVPDSTWRIMTTLNMLGGRQVIAAVKWAKAIPGFRNLHLDDQMTLLQYSWMFLMAFALGWRSYRQSSANLLCFAPDLIINEQRMTLPCMYDQCKHMLYVSSELHRLQVSYEEYLCMKTLLLLSSVPKDGLKSQELFDEIRMTYIKELGKAIVKREGNSSQNWQRFYQLTKLLDSMHEVVENLLNYCFQTFLDKTMSIEFPEMLAEIITNQIPKYSNGNIKKLLFHQK

SEQ ID NO: 499 - RNA, 452 nt, synthetic construct
  misc_feature 1..452: note = Synthetic
  source 1..452: mol_type = other RNA
cacggtaggcactgttaggagttttagagctagaaatagcaagttaaaataaggctagtccgttatcaacttgaaaaagtggcaccgagtcggtgcttgcctcggtccaatccttccggagtgcaggtggaaaccatctccccaggagacgggcgcaccttccccaagcgcggccagacctgcgtggtgcactacaccgggatgcttgaagatggaaagaaatttgattcctcccgggacagaaacaagccctttaagtttatgctaggcaagcaggaggtgatccgaggctgggaagaaggggttgcccagatgagtgtgggtcagagagccaaactgactatatctccagattatgcctatggtgccactgggcacccaggcatcatcccaccacatgccactctcgtcttcgatgtggagcttctaaaactggaataacagtgcctacc

SEQ ID NO: 500 - DNA, 464 bp, synthetic construct
  misc_feature 1..464: note = Synthetic
  source 1..464: mol_type = other DNA
ggcccagactgagcacgtgagttttagagctagaaatagcaagttaaaataaggctagtccgttatcaacttgaaaaagtggcaccgagtcggtgctggaggaagcagggcttcctttcctctgccatcattccagttttagaagctccacatcgaagacgagagtggcatgtggtgggatgatgcctgggtgcccagtggcaccataggcataatctggagatatagtcagtttggctctctgacccacactcatctgggcaaccccttcttcccagcctcggatcacctcctgcttgcctagcataaacttaaagggcttgtttctgtcccgggaggaatcaaatttctttccatcttcaagcatcccggtgtagtgcaccacgcaggtctggccgcgcttggggaaggtgcgcccgtctcctggggagatggtttccacctgcactcccgtgctcagtctg

SEQ ID NO: 501 - DNA, 905 bp, synthetic construct; identical to SEQ ID NO: 223
  misc_feature 1..905: note = Synthetic
  source 1..905: mol_type = other DNA

SEQ ID NO: 502 - DNA, 942 bp, synthetic construct; identical to SEQ ID NO: 224
  misc_feature 1..942: note = Synthetic
  source 1..942: mol_type = other DNA

SEQ ID NO: 503 - DNA, 1370 bp, synthetic construct; identical to SEQ ID NO: 225
  misc_feature 1..1370: note = Synthetic
  source 1..1370: mol_type = other DNA

SEQ ID NO: 504 - DNA, 807 bp, synthetic construct; identical to SEQ ID NO: 226
  misc_feature 1..807: note = Synthetic
  source 1..807: mol_type = other DNA

SEQ ID NO: 505 - DNA, 743 bp, synthetic construct; identical to SEQ ID NO: 227
  misc_feature 1..743: note = Synthetic
  source 1..743: mol_type = other DNA

SEQ ID NO: 506 - DNA, 20 bp, synthetic construct
  misc_feature 1..20: note = Synthetic
  source 1..20: mol_type = other DNA
ggcccagactgagcacgtga

SEQ ID NO: 507 - DNA, 20 bp, synthetic construct
  misc_feature 1..20: note = Synthetic
  source 1..20: mol_type = other DNA
ggcccagactgagcacgtga

SEQ ID NO: 508 - DNA, 20 bp, synthetic construct
  misc_feature 1..20: note = Synthetic
  source 1..20: mol_type = other DNA
ggcccagactgagcacgtga

SEQ ID NO: 509 - DNA, 20 bp, synthetic construct
  misc_feature 1..20: note = Synthetic
  source 1..20: mol_type = other DNA
ggcccagactgagcacgtga

SEQ ID NO: 510 - DNA, 20 bp, synthetic construct
  misc_feature 1..20: note = Synthetic
  source 1..20: mol_type = other DNA
ggcccagactgagcacgtga

SEQ ID NO: 511 - DNA, 20 bp, synthetic construct
  misc_feature 1..20: note = Synthetic
  source 1..20: mol_type = other DNA
ggcactgcggctggaggtgg

SEQ ID NO: 512 - DNA, 20 bp, synthetic construct
  misc_feature 1..20: note = Synthetic
  source 1..20: mol_type = other DNA
gagtccgagcagaagaagaa

SEQ ID NO: 513 - DNA, 20 bp, synthetic construct
  misc_feature 1..20: note = Synthetic
  source 1..20: mol_type = other DNA
ggaatcccttctgcagcacc

SEQ ID NO: 514 - protein, 1803 aa, synthetic construct; identical to SEQ ID NO: 162
  REGION 1..1803: note = Synthetic

SEQ ID NO: 515 - protein, 2117 aa, synthetic construct; identical to SEQ ID NO: 163
  REGION 1..2117: note = Synthetic

SEQ ID NO: 516 - protein, 2117 aa, synthetic construct; identical to SEQ ID NO: 164
  REGION 1..2117: note = Synthetic

SEQ ID NO: 517 - DNA, 34 bp, synthetic construct
  misc_feature 1..34: note = Synthetic
  source 1..34: mol_type = other DNA
ataacttcgtatagcatacattatacgaagttat

SEQ ID NO: 518 - DNA, 32 bp, synthetic construct
  misc_feature 1..32: note = Synthetic
  source 1..32: mol_type = other DNA
taactttaaataatgccaattatttaaagtta

SEQ ID NO: 519 - DNA, 34 bp, synthetic construct
  misc_feature 1..34: note = Synthetic
  source 1..34: mol_type = other DNA
tcaatttctgagaactgtcattctcggaaattga

SEQ ID NO: 520 - DNA, 34 bp, synthetic construct
  misc_feature 1..34: note = Synthetic
  source 1..34: mol_type = other DNA
ctcgtgtccgataactgtaattatcggacatgat

SEQ ID NO: 521 - DNA, 34 bp, synthetic construct
  misc_feature 1..34: note = Synthetic
  source 1..34: mol_type = other DNA
gaagttcctattctctagaaagtataggaacttc

SEQ ID NO: 522 - DNA, 39 bp, synthetic construct
  misc_feature 1..39: note = Synthetic
  source 1..39: mol_type = other DNA
gagtttcattaaggaataactaattccctaatgaaactc

SEQ ID NO: 523 - DNA, 33 bp, synthetic construct
  misc_feature 1..33: note = Synthetic
  source 1..33: mol_type = other DNA
ggttgcttaagaataagtaattcttaagcaacc

SEQ ID NO: 524 - DNA, 43 bp, synthetic construct
  misc_feature 1..43: note = Synthetic
  source 1..43: mol_type = other DNA
acgaaaaatggtaaggaatagaccattccttaccatttttggt

SEQ ID NO: 525 - DNA, 31 bp, synthetic construct
  misc_feature 1..31: note = Synthetic
  source 1..31: mol_type = other DNA
ttgatgaaagaataacgtattctttcatcaa

SEQ ID NO: 526 - DNA, 33 bp, synthetic construct
  misc_feature 1..33: note = Synthetic
  source 1..33: mol_type = other DNA
gtgcgtcaaataataacgtattatttgacactt

SEQ ID NO: 527 - DNA, 34 bp, synthetic construct
  misc_feature 1..34: note = Synthetic
  source 1..34: mol_type = other DNA
aataggtctgagaacgcccattctcagacgtatt

SEQ ID NO: 528 - DNA, 34 bp, synthetic construct
  misc_feature 1..34: note = Synthetic
  source 1..34: mol_type = other DNA
tgaatgtcctataattacacttataggacattca

SEQ ID NO: 529 - DNA, 34 bp, synthetic construct
  misc_feature 1..34: note = Synthetic
  source 1..34: mol_type = other DNA
gaaactttaaataataagtcttatttaaagtttc

SEQ ID NO: 530 - DNA, 61 bp, synthetic construct
  misc_feature 1..61: note = Synthetic
  source 1..61: mol_type = other DNA
aaacgatatcagacatttgtctgataatgcttcattatcagacaaatgtctgatatcgttt

SEQ ID NO: 531 - DNA, 34 bp, synthetic construct
  misc_feature 1..34: note = Synthetic
  source 1..34: mol_type = other DNA
atatatacgtatatagacatatatacgtatatat

SEQ ID NO: 532 - DNA, 34 bp, synthetic construct
  misc_feature 1..34: note = Synthetic
  source 1..34: mol_type = other DNA
ataactctatataatgtatgctatatagagttat

SEQ ID NO: 533 - DNA, 34 bp, synthetic construct
  misc_feature 1..34: note = Synthetic
  source 1..34: mol_type = other DNA
acaacatcctattacaccctatatgccaacatgg

SEQ ID NO: 534 - DNA, 34 bp, synthetic construct
  misc_feature 1..34: note = Synthetic
  source 1..34: mol_type = other DNA
aacccactgcttaagcctcaataaagcttgcctt

SEQ ID NO: 535 - DNA, 34 bp, synthetic construct
  misc_feature 1..34: note = Synthetic
  source 1..34: mol_type = other DNA
gatacaacgtatatacctttctatacgttgttta

SEQ ID NO: 536 - DNA, 48 bp, synthetic construct
  misc_feature 1..48: note = Synthetic
  source 1..48: mol_type = other DNA
ggtttgtctggtcaaccaccgcggtctcagtggtgtacggtacaaacc

SEQ ID NO: 537 - DNA, 38 bp, synthetic construct
  misc_feature 1..38: note = Synthetic
  source 1..38: mol_type = other DNA
ggcttgtcgacgacggcggtctccgtcgtcaggatcat

SEQ ID NO: 538 - DNA, 42 bp, synthetic construct
  misc_feature 1..42: note = Synthetic
  source 1..42: mol_type = other DNA
gtgccccaactggggtaacctttgagttctctcagttggggg

SEQ ID NO: 539 - DNA, 45 bp, synthetic construct
  misc_feature 1..45: note = Synthetic
  source 1..45: mol_type = other DNA
tgcgggtgccagggcgtgcccttgggctccccgggcgcgtactcc

SEQ ID NO: 540 - DNA, 50 bp, synthetic construct
  misc_feature 1..50: note = Synthetic
  source 1..50: mol_type = other DNA
tgttccccaaagcgataccacttgaagcagtggtactgcttgtgggtaca

SEQ ID NO: 541 - DNA, 64 bp, synthetic construct
  misc_feature 1..64: note = Synthetic
  source 1..64: mol_type = other DNA
gcatgttccccaaagcgataccacttgaagcagtggtactgcttgtgggtacactctgcgggtg

SEQ ID NO: 542 - DNA, 52 bp, synthetic construct
  misc_feature 1..52: note = Synthetic
  source 1..52: mol_type = other DNA
ggtgctgggttgttgtctctggacagtgatccatgggaaactactcagcacc

SEQ ID NO: 543 - DNA, 34 bp, synthetic construct
  misc_feature 1..34: note = Synthetic
  source 1..34: mol_type = other DNA
caggtttttgacgaaagtgatccagatgatccag

SEQ ID NO: 544 - DNA, 54 bp, synthetic construct
  misc_feature 1..54: note = Synthetic
  source 1..54: mol_type = other DNA
attttaggtatatgattttgtttattagtgtaaataacactatgtacctaaaat

SEQ ID NO: 545 - DNA, 42 bp, synthetic construct
  misc_feature 1..42: note = Synthetic
  source 1..42: mol_type = other DNA
caaaggatcactgaatcaaaagtattgctcatccacgcgaaa

SEQ ID NO: 546 - DNA, 55 bp, synthetic construct
  misc_feature 1..55: note = Synthetic
  source 1..55: mol_type = other DNA
tttgtgcggaactacgaacagttcattaatacgaagtgtacaaacttccatacaa

SEQ ID NO: 547 - DNA, 56 bp, synthetic construct
  misc_feature 1..56: note = Synthetic
  source 1..56: mol_type = other DNA
cgaaaatgtatggaggcacttgtatcaatataggatgtataccttcgaagacactt

SEQ ID NO: 548 - DNA, 53 bp, synthetic construct
  misc_feature 1..53: note = Synthetic
  source 1..53: mol_type = other DNA
gagtttttatttcgtttatttcaattaaggtaactaaaaaactccttttaagg

SEQ ID NO: 549 - DNA, 53 bp, synthetic construct
  misc_feature 1..53: note = Synthetic
  source 1..53: mol_type = other DNA
atgccaacacaattaacatctcaatcaaggtaaatgctttttgctttttttgc

SEQ ID NO: 550 - DNA, 40 bp, synthetic construct
  misc_feature 1..40: note = Synthetic
  source 1..40: mol_type = other DNA
ttcctcgttttctctcgttggaagaagaagaaacgagaaa

SEQ ID NO: 551 - DNA, 40 bp, synthetic construct
  misc_feature 1..40: note = Synthetic
  source 1..40: mol_type = other DNA
tttcggatcaagctatgaaggacgcaaagagggaactaaa

SEQ ID NO: 552 - DNA, 40 bp, synthetic construct
  misc_feature 1..40: note = Synthetic
  source 1..40: mol_type = other DNA
ttcctcgttttctctcgttggacggaaacgaatcgagaaa

SEQ ID NO: 553 - DNA, 40 bp, synthetic construct; identical to SEQ ID NO: 551
  misc_feature 1..40: note = Synthetic
  source 1..40: mol_type = other DNA

SEQ ID NO: 554 - DNA, 52 bp, synthetic construct
  misc_feature 1..52: note = Synthetic
  source 1..52: mol_type = other DNA
gtagtgtatctcacaggtccacggttggccgtggactgctgaagaacattcc

SEQ ID NO: 555 - DNA, 40 bp, synthetic construct
  misc_feature 1..40: note = Synthetic
  source 1..40: mol_type = other DNA
gaaggtgttggtgcggggttggccgtggtcgaggtggggt

SEQ ID NO: 556 - DNA, 52 bp, synthetic construct
  misc_feature 1..52: note = Synthetic
  source 1..52: mol_type = other DNA
aaaaaaatacagcgtttttcatgtacaactatactagttgtagtgcctaaaa

SEQ ID NO: 557 - DNA, 54 bp, synthetic construct
  misc_feature 1..54: note = Synthetic
  source 1..54: mol_type = other DNA
ttgtaaaggagactgataatggcatgtacaactatactcgtcggtaaaaaggca

SEQ ID NO: 558 - DNA, 46 bp, synthetic construct
  misc_feature 1..46: note = Synthetic
  source 1..46: mol_type = other DNA
tccagcccaacagtgttagtctttgctcttacccagttgggcggga

SEQ ID NO: 559 - DNA, 47 bp, synthetic construct
  misc_feature 1..47: note = Synthetic
  source 1..47: mol_type = other DNA
gatcagctccgcgggcaagacctttctccttcacggggtggaaggtc

SEQ ID NO: 560 - DNA, 63 bp, synthetic construct
  misc_feature 1..63: note = Synthetic
  source 1..63: mol_type = other DNA
ctagttttaaagttggttattagttactgtgatatttatcacggtacccaataaccaatgaat

SEQ ID NO: 561 - DNA, 71 bp, synthetic construct
  misc_feature 1..71: note = Synthetic
  source 1..71: mol_type = other DNA
cggaaggtagcgtcaacgataggtgtaactgtcgtgtttgtaacggtacttccaacagctggcgccgccac

SEQ ID NO: 562 - DNA, 33 bp, synthetic construct
  misc_feature 1..33: note = Synthetic
  source 1..33: mol_type = other DNA
caatgaaaaactaggcatgtagaagttgtttgt

SEQ ID NO: 563 - DNA, 32 bp, synthetic construct
  misc_feature 1..32: note = Synthetic
  source 1..32: mol_type = other DNA
tttccacagacaactcacgtggaggtagtcac

SEQ ID NO: 564 - DNA, 56 bp, synthetic construct
  misc_feature 1..56: note = Synthetic
  source 1..56: mol_type = other DNA
tgtagtaagtatcttaatatacagctttatctgttttttaagatacttactacttt

SEQ ID NO: 565 - DNA, 58 bp, synthetic construct
  misc_feature 1..58: note = Synthetic
  source 1..58: mol_type = other DNA
cacccattgtgttcacaggagatacagctttatctgtactgatattaatgacatgctg

SEQ ID NO: 566 - DNA, 47 bp, synthetic construct
  misc_feature 1..47: note = Synthetic
  source 1..47: mol_type = other DNA
agttgtggccatgtgtccatctgggggcagatggagacggggtcaca

SEQ ID NO: 567 - DNA, 50 bp, synthetic construct
  misc_feature 1..50: note = Synthetic
  source 1..50: mol_type = other DNA
atctggatgtgggtgtccatctgcgggcagacgccgcagtcgaagcacgg

SEQ ID NO: 568 - DNA, 50 bp, synthetic construct
  misc_feature 1..50: note = Synthetic
  source 1..50: mol_type = other DNA
accttgatctcggtgtccatcgccgggcagacgccgcagtcgaagcacgg

SEQ ID NO: 569 - DNA, 60 bp, synthetic construct
  misc_feature 1..60: note = Synthetic
  source 1..60: mol_type = other DNA
ccctaatacgcaagtcgataactctcctgggagcgttgacaacttgcgcaccctgatctg

SEQ ID NO: 570 - DNA, 61 bp, synthetic construct
  misc_feature 1..61: note = Synthetic
  source 1..61: mol_type = other DNA
gagcgccggatcagggagtggacggcctgggagcgctacacgctgtggctgcggtcggtgc

SEQ ID NO: 571 - DNA, 63 bp, synthetic construct
  misc_feature 1..63: note = Synthetic
  source 1..63: mol_type = other DNA
gctcatgtatgtgtctacgcgagattctcgcccgagaacttctgcaaggcactgctcttggct

SEQ ID NO: 572 - DNA, 59 bp, synthetic construct
  misc_feature 1..59: note = Synthetic
  source 1..59: mol_type = other DNA
ggacggcgcagaaggggagtagctcttcgccggaccgtcgacatactgctcagctcgtc

SEQ ID NO: 573 - DNA, 65 bp, synthetic construct
  misc_feature 1..65: note = Synthetic
  source 1..65: mol_type = other DNA
atggataaaaaaatacagcgtttttcatgtacaactatactagttgtagtgcctaaataatgctt

SEQ ID NO: 574 - DNA, 62 bp, synthetic construct
  misc_feature 1..62: note = Synthetic
  source 1..62: mol_type = other DNA
gtttgtaaaggagactgataatggcatgtacaactatactcgtcggtaaaaaggcatcttat

SEQ ID NO: 575 - DNA, 62 bp, synthetic construct
  misc_feature 1..62: note = Synthetic
  source 1..62: mol_type = other DNA
aaaaattacaaagttttcaacccttgatttgaattagcggtcaaataatttgtaattcgttt

SEQ ID NO: 576 - DNA, 66 bp, synthetic construct
  misc_feature 1..66: note = Synthetic
  source 1..66: mol_type = other DNA
ttccaaagagcgcccaacgcgacctgaaatttgaataagactgctgcttgtgtaaaggcgatgatt

SEQ ID NO: 577 - DNA, 66 bp, synthetic construct
  misc_feature 1..66: note = Synthetic
  source 1..66: mol_type = other DNA
gtgttataaacctgtgtgagagttaagtttacatgcctaaccttaacttttacgcaggttcagctt

SEQ ID NO: 578 - DNA, 62 bp, synthetic construct
  misc_feature 1..62: note = Synthetic
  source 1..62: mol_type = other DNA
agacgagaaacgttccgtccgtctgggtcagttgggcaaagttgatgaccgggtcgtccgtt

SEQ ID NO: 579 - DNA, 64 bp, synthetic construct
  misc_feature 1..64: note = Synthetic
  source 1..64: mol_type = other DNA
ttaataaactatggaagtatgtacagtcttgcaatgttgagtgaacaaacttccataataaaat

SEQ ID NO: 580 - DNA, 65 bp, synthetic construct
  misc_feature 1..65: note = Synthetic
  source 1..65: mol_type = other DNA
caatcatcagataactatggcggcacgtgcattaaccacggttgtatcccgtctaaagtactcgt

SEQ ID NO: 581 - DNA, 62 bp, synthetic construct
  misc_feature 1..62: note = Synthetic
  source 1..62: mol_type = other DNA
gtggttgtttttgttggaagtgtgtatcaggtatctgcatagttattccgaacttccaatta

SEQ ID NO: 582 - DNA, 65 bp, synthetic construct
  misc_feature 1..65: note = Synthetic
  source 1..65: mol_type = other DNA
tttatattgcgaaaaataattggcgaacgaggtaactggatacctcatccgccaattaaaatttg

SEQ ID NO: 583 - DNA, 62 bp, synthetic construct
  misc_feature 1..62: note = Synthetic
  source 1..62: mol_type = other DNA
ggaaaatataaataattttagtaacctacatctcaatcaaggatagtaaaactctcactctt

SEQ ID NO: 584 - DNA, 62 bp, synthetic construct
  misc_feature 1..62: note = Synthetic
  source 1..62: mol_type = other DNA
agcacgctgataatcagcaagaccaccaacatttccaccaatgtaaaagctttaaccttagc

SEQ ID NO: 585 - DNA, 65 bp, synthetic construct
  misc_feature 1..65: note = Synthetic
  source 1..65: mol_type = other DNA
gtttatatgtttactaataagacgctctcaacccataaagtcttattagtaaacatatttcaact

SEQ ID NO: 586 - DNA, 65 bp, synthetic construct
  misc_feature 1..65: note = Synthetic
  source 1..65: mol_type = other DNA
atggattttgcagattcccagatgcccctacagaaagaggtacaaaacatttattggaattaatt

SEQ ID NO: 587 - DNA, 65 bp, synthetic construct
  misc_feature 1..65: note = Synthetic
  source 1..65: mol_type = other DNA
tttttgtatgttagttgtgtcactgggtagacctaaatagtgacacaactgctattaaaatttaa

SEQ ID NO: 588 - DNA, 66 bp, synthetic construct
  misc_feature 1..66: note = Synthetic
  source 1..66: mol_type = other DNA
gttcgtggtaactatgggtggtacaggtgccacattagttgtaccatttatgtttatgtggttaac

SEQ ID NO: 589 - DNA, 64 bp, synthetic construct
  misc_feature 1..64: note = Synthetic
  source 1..64: mol_type = other DNA
caataacggttgtatttgtagaacttgaccagttgttttagtaacataaatacaactccgaata

SEQ ID NO: 590 - DNA, 64 bp, synthetic construct
  misc_feature 1..64: note = Synthetic
  source 1..64: mol_type = other DNA
gcatacattgttgttgtttttccagatccagttggtcctgtaaatataagcaatccatgtgagt

SEQ ID NO: 591 - DNA, 52 bp, synthetic construct
  misc_feature 1..52: note = Synthetic
  source 1..52: mol_type = other DNA
gtttagtatctcgttatctctcgttggagggagaagaaacgggataccaaaa

SEQ ID NO: 592 - DNA, 52 bp, synthetic construct
  misc_feature 1..52: note = Synthetic
  source 1..52: mol_type = other DNA
taactttttcggatcgagttatgatggacgtaaagagggaacaaagcatcta

SEQ ID NO: 593 - DNA, 52 bp, synthetic construct
  misc_feature 1..52: note = Synthetic
  source 1..52: mol_type = other DNA
tagtttccaatgttacaggaactgctggcagaatccaacacattggaagtcg

SEQ ID NO: 594 - DNA, 42 bp, synthetic construct
  misc_feature 1..42: note = Synthetic
  source 1..42: mol_type = other DNA
cggtctccatcgggatctgctgatcgagcagcatgccgacca

SEQ ID NO: 595 - DNA, 52 bp, synthetic construct
  misc_feature 1..52: note = Synthetic
  source 1..52: mol_type = other DNA
taaccgcaagtgtacatccctcggctggccgagacaagtacagttgcgacag

SEQ ID NO: 596 - DNA, 42 bp, synthetic construct; identical to SEQ ID NO: 594
  misc_feature 1..42: note = Synthetic
  source 1..42: mol_type = other DNA

SEQ ID NO: 597 - DNA, 52 bp, synthetic construct
  misc_feature 1..52: note = Synthetic
  source 1..52: mol_type = other DNA
atgtggtcctttagatccactgacgtgggtcagtgtctctaaaggactcgcg

SEQ ID NO: 598 - DNA, 53 bp, synthetic construct
  misc_feature 1..53: note = Synthetic
  source 1..53: mol_type = other DNA
catcagggcggtcaggccgtagatgtggaagaaacggcagcacggcgaggacg

SEQ ID NO: 599 - DNA, 32 bp, synthetic construct
  misc_feature 1..32: note = Synthetic
  source 1..32: mol_type = other DNA
cgtttcctgtaaaccgaggttttggataaaca

SEQ ID NO: 600 - DNA, 32 bp, synthetic construct
  misc_feature 1..32: note = Synthetic
  source 1..32: mol_type = other DNA
cgtttcctgtaaaccgaggttttggataatgg

SEQ ID NO: 601 - DNA, 32 bp, synthetic construct
  misc_feature 1..32: note = Synthetic
  source 1..32: mol_type = other DNA
gagttctcttaaaccaaggtttaggattgaaa

SEQ ID NO: 602 - DNA, 32 bp, synthetic construct
  misc_feature 1..32: note = Synthetic
  source 1..32: mol_type = other DNA
gagttctcttaaaccaaggtattggataacag

SEQ ID NO: 603 - DNA, 32 bp, synthetic construct
  misc_feature 1..32: note = Synthetic
  source 1..32: mol_type = other DNA
tggttcttgaaaaccaaggtttttgataaagc

SEQ ID NO: 604 - DNA, 33 bp, synthetic construct
  misc_feature 1..33: note = Synthetic
  source 1..33: mol_type = other DNA
aaattttcctttttggaaggtttttgataacca

SEQ ID NO: 605 - DNA, 32 bp, synthetic construct
  misc_feature 1..32: note = Synthetic
  source 1..32: mol_type = other DNA
gccttcccctaaaccaacgtttttatgccgcc

SEQ ID NO: 606 - DNA, 32 bp, synthetic construct
  misc_feature 1..32: note = Synthetic
  source 1..32: mol_type = other DNA
gccttcccccaaaccaaggtaatcaagaacgc

SEQ ID NO: 607 - DNA, 32 bp, synthetic construct
  misc_feature 1..32: note = Synthetic
  source 1..32: mol_type = other DNA
ttgtgaaatttgggtacaccctaatcatacaa

SEQ ID NO: 608 - DNA, 26 bp, synthetic construct
  misc_feature 1..26: note = Synthetic
  source 1..26: mol_type = other DNA
cgtatgattagggtgtatattaattt

SEQ ID NO: 609 - DNA, 101 bp, synthetic construct
  misc_feature 1..101: note = Synthetic
  source 1..101: mol_type = other DNA
caaatgattttattttgactaataatgacctacttacattaatttactgataattaaagagattttaaatatacaacttattcacctaaaggatgacaaaa

SEQ ID NO: 610 - DNA, 21 bp, synthetic construct
  misc_feature 1..21: note = Synthetic
  source 1..21: mol_type = other DNA
gcactttaggtgaaaaaggtt

SEQ ID NO: 611 - DNA, 126 bp, synthetic construct
  misc_feature 1..126: note = Synthetic
  source 1..126: mol_type = other DNA
taacattaatcacttaaaaatcatcgcattacactaatctgtggttaaatgatagactacataatgcgacaaaacgcaacatatccagtcactatgaatcaactacttagatagtattagtgacct

SEQ ID NO: 612 - DNA, 259 bp, synthetic construct
  misc_feature 1..259: note = Synthetic
  source 1..259: mol_type = other DNA
ctaagtggtttgggacaaaaatgggacatacaaatctttgcatcggtttgcaaggctttgcatgtctttcgaagatgggacgtgtgagcgcaggtatgacgtggtatgtgttgacttaaaaggtagttcttataattcgtaatgcgaaggtcgtaggttcgactcctattatcggcaccagttaaatcaaatacttacgtattattcgtgccttccttatttttactgtgggacatatttgggacagaagtaccaaaaa

SEQ ID NO: 613 - DNA, 27 bp, synthetic construct
  misc_feature 1..27: note = Synthetic
  source 1..27: mol_type = other DNA
gcagcgcattcgtaatgcgaaggtcgt

SEQ ID NO: 614 - DNA, 412 bp, synthetic construct
  misc_feature 1..412: note = Synthetic
  source 1..412: mol_type = other DNA
gcgatccccatccgcgacgtgccaactaggtctcctctcgtcgtgaacaaggctaccgggttgcaactcctgtgcaactctcaggcttcaacgcgcttctacgacctgcaatttctttccacttagaggatgcagccgagaggggtaaaaacctatcttgaccggcccatatgtggtcggcagacacccattcttccaaactagctacgcgggttcgattcccgtcgcccgctccgctggtcagagggtgttttcgccctctggccatttttctttccaggggtctgcaactcttgtgcgactcttctgacctgggcatacgcggttgcaacgcatccctgatctggctactttcgatgctgacaaacgaatagagccccccgcctgcgcgaacagacgaggggcattcaca

SEQ ID NO: 615 - DNA, 43 bp, synthetic construct
  misc_feature 1..43: note = Synthetic
  source 1..43: mol_type = other DNA
gagcgggcgacgggaatcgaacccgcgtagctagtttggaaga

SEQ ID NO: 616 - DNA, 20 bp, synthetic construct
  misc_feature 1..20: note = Synthetic
  source 1..20: mol_type = other DNA
gtcaaccagtatcccggtgc

SEQ ID NO: 617 - DNA, 20 bp, synthetic construct
  misc_feature 1..20: note = Synthetic
  source 1..20: mol_type = other DNA
ggggtcccaggtgctgacgt

SEQ ID NO: 618 - DNA, 21 bp, synthetic construct
  misc_feature 1..21: note = Synthetic
  source 1..21: mol_type = other DNA
gatgtacagagagcccagggc

SEQ ID NO: 619 - DNA, 20 bp, synthetic construct
  misc_feature 1..20: note = Synthetic
  source 1..20: mol_type = other DNA
gtcaaccagtatcccggtgc

SEQ ID NO: 620 - DNA, 21 bp, synthetic construct
  misc_feature 1..21: note = Synthetic
  source 1..21: mol_type = other DNA
gatgtacagagagcccagggc

SEQ ID NO: 621 - DNA, 20 bp, synthetic construct
  misc_feature 1..20: note = Synthetic
  source 1..20: mol_type = other DNA
ggggtcccaggtgctgacgt

SEQ ID NO: 622 - protein, 4 aa, synthetic construct
  REGION 1..4: note = Synthetic
FCPF

SEQ ID NO: 623-624 - skipped (2 entries)

SEQ ID NO: 625 - DNA, 209 bp, synthetic construct
  misc_feature 1..209: note = Synthetic
  source 1..209: mol_type = other DNA
ttcattcagcaagttcagagaaatctgaacttgctggatttttggagcagggagatggaataggagcttgctccgtccactccacgcatcgacctggtattgcagtacctccaggaacggtgcacccactttctggagtttcaaaagtagactgtacgctaagggtcatatctttttttgtttggtttgtgtcttggttggcgtcttaa

SEQ ID NO: 626 - DNA, 21 bp, synthetic construct
  misc_feature 1..21: note = Synthetic
  source 1..21: mol_type = other DNA
gccttgataccaacctgccca

SEQ ID NO: 627 - DNA, 21 bp, synthetic construct
  misc_feature 1..21: note = Synthetic
  source 1..21: mol_type = other DNA
gctggaactggtcaccaaggc

SEQ ID NO: 628 - DNA, 21 bp, synthetic construct
  misc_feature 1..21: note = Synthetic
  source 1..21: mol_type = other DNA
gtacctgaaccgtatatccta

SEQ ID NO: 629 - DNA, 21 bp, synthetic construct
  misc_feature 1..21: note = Synthetic
  source 1..21: mol_type = other DNA
gtacctgaaccgtatatctta

SEQ ID NO: 630 - protein, 535 aa, synthetic construct; identical to SEQ ID NO: 398
  REGION 1..535: note = Synthetic

SEQ ID NO: 631 - skipped

SEQ ID NO: 632 - DNA, 20 bp, synthetic construct
  misc_feature 1..20: note = Synthetic
  source 1..20: mol_type = other DNA
ggcccagactgagcacgtga

SEQ ID NO: 633 - DNA, 20 bp, synthetic construct
  misc_feature 1..20: note = Synthetic
  source 1..20: mol_type = other DNA
ggcccagactgagcacgtga

SEQ ID NO: 634 - DNA, 20 bp, synthetic construct
  misc_feature 1..20: note = Synthetic
  source 1..20: mol_type = other DNA
ggcccagactgagcacgtga

SEQ ID NO: 635 - DNA, 20 bp, synthetic construct
  misc_feature 1..20: note = Synthetic
  source 1..20: mol_type = other DNA
ggcccagactgagcacgtga

SEQ ID NO: 636 - DNA, 20 bp, synthetic construct
  misc_feature 1..20: note = Synthetic
  source 1..20: mol_type = other DNA
ggcccagactgagcacgtga

SEQ ID NO: 637 - DNA, 20 bp, synthetic construct
  misc_feature 1..20: note = Synthetic
  source 1..20: mol_type = other DNA
gtcatcttagtcattacctg

SEQ ID NO: 638 - DNA, 20 bp, synthetic construct
  misc_feature 1..20: note = Synthetic
  source 1..20: mol_type = other DNA
gtcatcttagtcattacctg

SEQ ID NO: 639 - DNA, 20 bp, synthetic construct
  misc_feature 1..20: note = Synthetic
  source 1..20: mol_type = other DNA
gtcatcttagtcattacctg

SEQ ID NO: 640 - DNA, 21 bp, synthetic construct
  misc_feature 1..21: note = Synthetic
  source 1..21: mol_type = other DNA
gcatggtgcacctgactcctg

SEQ ID NO: 641 - DNA, 23 bp, synthetic construct
  misc_feature 1..23: note = Synthetic
  source 1..23: mol_type = other DNA
tctgccatcccgtgctcagtctg

SEQ ID NO: 642 - DNA, 23 bp, synthetic construct
  misc_feature 1..23: note = Synthetic
  source 1..23: mol_type = other DNA
tctgccagcacgtgctcagtctg

SEQ ID NO: 643 - DNA, 23 bp, synthetic construct
  misc_feature 1..23: note = Synthetic
  source 1..23: mol_type = other DNA
tctgccaacacgtgctcagtctg

SEQ ID NO: 644 - DNA, 47 bp, synthetic construct
  misc_feature 1..47: note = Synthetic
  source 1..47: mol_type = other DNA
tggaggaagcagggcttcctttcctctgaaaacacgtgctcagtctg

SEQ ID NO: 645 - DNA, 26 bp, synthetic construct
  misc_feature 1..26: note = Synthetic
  source 1..26: mol_type = other DNA
tctgccatcaaagcgtgctcagtctg

SEQ ID NO: 646 - DNA, 29 bp, synthetic construct
  misc_feature 1..29: note = Synthetic
  source 1..29: mol_type = other DNA
aacgaacacctcatgtaatgactaagatg

SEQ ID NO: 647 - DNA, 29 bp, synthetic construct
  misc_feature 1..29: note = Synthetic
  source 1..29: mol_type = other DNA
aacgaacacctcacgtaatgactaagatg

SEQ ID NO: 648 - DNA, 32 bp, synthetic construct
  misc_feature 1..32: note = Synthetic
  source 1..32: mol_type = other DNA
aacgaacacctcagtacgtaatgactaagatg

SEQ ID NO: 649 - DNA, 27 bp, synthetic construct
  misc_feature 1..27: note = Synthetic
  source 1..27: mol_type = other DNA
agacttctccacaggagtcaggtgcac

SEQ ID NO: 650-659 - skipped (10 entries)

SEQ ID NO: 660 - protein, 1803 aa, synthetic construct; identical to SEQ ID NO: 162
  REGION 1..1803: note = Synthetic

SEQ ID NO: 661 - protein, 2117 aa, synthetic construct; identical to SEQ ID NO: 163
  REGION 1..2117: note = Synthetic

SEQ ID NO: 662 - protein, 2117 aa, synthetic construct; identical to SEQ ID NO: 164
  REGION 1..2117: note = Synthetic

SEQ ID NO: 663 - DNA, 20 bp, synthetic construct
  misc_feature 1..20: note = Synthetic
  source 1..20: mol_type = other DNA
ggcccagactgagcacgtga

SEQ ID NO: 664 - DNA, 20 bp, synthetic construct
  misc_feature 1..20: note = Synthetic
  source 1..20: mol_type = other DNA
ggcccagactgagcacgtga

SEQ ID NO: 665 - DNA, 20 bp, synthetic construct
  misc_feature 1..20: note = Synthetic
  source 1..20: mol_type = other DNA
ggcccagactgagcacgtga

SEQ ID NO: 666 - DNA, 20 bp, synthetic construct
  misc_feature 1..20: note = Synthetic
  source 1..20: mol_type = other DNA
ggcccagactgagcacgtga

SEQ ID NO: 667 - DNA, 20 bp, synthetic construct
  misc_feature 1..20: note = Synthetic
  source 1..20: mol_type = other DNA
ggcactgcggctggaggtgg

SEQ ID NO: 668 - DNA, 20 bp, synthetic construct
  misc_feature 1..20: note = Synthetic
  source 1..20: mol_type = other DNA
ggcactgcggctggaggtgg

SEQ ID NO: 669 - DNA, 20 bp, synthetic construct
  misc_feature 1..20: note = Synthetic
  source 1..20: mol_type = other DNA
ggcactgcggctggaggtgg

SEQ ID NO: 670 - DNA, 20 bp, synthetic construct
  misc_feature 1..20: note = Synthetic
  source 1..20: mol_type = other DNA
ggcactgcggctggaggtgg

SEQ ID NO: 671 - DNA, 20 bp, synthetic construct
  misc_feature 1..20: note = Synthetic
  source 1..20: mol_type = other DNA
gagtccgagcagaagaagaa

SEQ ID NO: 672 - DNA, 20 bp, synthetic construct
  misc_feature 1..20: note = Synthetic
  source 1..20: mol_type = other DNA
gagtccgagcagaagaagaa

SEQ ID NO: 673 - DNA, 20 bp, synthetic construct
  misc_feature 1..20: note = Synthetic
  source 1..20: mol_type = other DNA
gagtccgagcagaagaagaa

SEQ ID NO: 674 - DNA, 20 bp, synthetic construct
  misc_feature 1..20: note = Synthetic
  source 1..20: mol_type = other DNA
gagtccgagcagaagaagaa

SEQ ID NO: 675 - DNA, 20 bp, synthetic construct
  misc_feature 1..20: note = Synthetic
  source 1..20: mol_type = other DNA
ggaatcccttctgcagcacc

SEQ ID NO: 676 - DNA, 20 bp, synthetic construct
  misc_feature 1..20: note = Synthetic
  source 1..20: mol_type = other DNA
ggaatcccttctgcagcacc

SEQ ID NO: 677 - DNA, 20 bp, synthetic construct
  misc_feature 1..20: note = Synthetic
  source 1..20: mol_type = other DNA
ggaatcccttctgcagcacc

SEQ ID NO: 678 - DNA, 23 bp, synthetic construct
  misc_feature 1..23: note = Synthetic
  source 1..23: mol_type = other DNA
tctgccatctcgtgctcagtctg

SEQ ID NO: 679 - DNA, 26 bp, synthetic construct
  misc_feature 1..26: note = Synthetic
  source 1..26: mol_type = other DNA
tctgccatcaaagcgtgctcagtctg

SEQ ID NO: 680 - DNA, 22 bp, synthetic construct
  misc_feature 1..22: note = Synthetic
  source 1..22: mol_type = other DNA
tctgccatccgtgctcagtctg

SEQ ID NO: 681 - DNA, 23 bp, synthetic construct
  misc_feature 1..23: note = Synthetic
  source 1..23: mol_type = other DNA
tctgcgatcacgtgctcagtctg

SEQ ID NO: 682 - DNA, 19 bp, synthetic construct
  misc_feature 1..19: note = Synthetic
  source 1..19: mol_type = other DNA
ttaacgcccacctccagcc

SEQ ID NO: 683 - DNA, 19 bp, synthetic construct
  misc_feature 1..19: note = Synthetic
  source 1..19: mol_type = other DNA
ttaacccccccctccagcc

SEQ ID NO: 684 - DNA, 22 bp, synthetic construct
  misc_feature 1..22: note = Synthetic
  source 1..22: mol_type = other DNA
ttaaccccttacacctccagcc

SEQ ID NO: 685 - DNA, 18 bp, synthetic construct
  misc_feature 1..18: note = Synthetic
  source 1..18: mol_type = other DNA
ttaaccccccctccagcc

SEQ ID NO: 686 - DNA, 30 bp, synthetic construct
  misc_feature 1..30: note = Synthetic
  source 1..30: mol_type = other DNA
gtgatgggagcacttcttcttctgctcgga

SEQ ID NO: 687 - DNA, 30 bp, synthetic construct
  misc_feature 1..30: note = Synthetic
  source 1..30: mol_type = other DNA
gtgatgggagccctgcttcttctgctcgga

SEQ ID NO: 688 - DNA, 33 bp, synthetic construct
  misc_feature 1..33: note = Synthetic
  source 1..33: mol_type = other DNA
gtgatgggagcccttcgcattcttctgctcgga

SEQ ID NO: 689 - DNA, 27 bp, synthetic construct
  misc_feature 1..27: note = Synthetic
  source 1..27: mol_type = other DNA
gtgatgggagttcttcttctgctcgga

SEQ ID NO: 690 - DNA, 31 bp, synthetic construct
  misc_feature 1..31: note = Synthetic
  source 1..31: mol_type = other DNA
ggaaaagcgatgcaggtgctgcagaagggat

SEQ ID NO: 691 - DNA, 31 bp, synthetic construct
  misc_feature 1..31: note = Synthetic
  source 1..31: mol_type = other DNA
ggaaaagcgatccaggcgctgcagaagggat

SEQ ID NO: 692 - DNA, 34 bp, synthetic construct
  misc_feature 1..34: note = Synthetic
  source 1..34: mol_type = other DNA
ggaaaagcgatccaatcggtgctgcagaagggat

SEQ ID NO: 693-699 - skipped (7 entries)

SEQ ID NO: 700 - protein, 677 aa, unidentified; identical to SEQ ID NO: 89
  REGION 1..677: note = moloney murine leukemia virus

SEQ ID NO: 701 - protein, 677 aa, synthetic construct; identical to SEQ ID NO: 106
  REGION 1..677: note = Synthetic

SEQ ID NO: 702 - protein, 677 aa, synthetic construct; identical to SEQ ID NO: 107
  REGION 1..677: note = Synthetic

SEQ ID NO: 703 - protein, 677 aa, synthetic construct; identical to SEQ ID NO: 109
  REGION 1..677: note = Synthetic

SEQ ID NO: 704 - protein, 677 aa, synthetic construct; identical to SEQ ID NO: 110
  REGION 1..677: note = Synthetic

SEQ ID NO: 705 - protein, 677 aa, synthetic construct; identical to SEQ ID NO: 111
  REGION 1..677: note = Synthetic

SEQ ID NO: 706 - protein, 677 aa, synthetic construct; identical to SEQ ID NO: 112
  REGION 1..677: note = Synthetic

SEQ ID NO: 707 - protein, 677 aa, synthetic construct; identical to SEQ ID NO: 113
  REGION 1..677: note = Synthetic

SEQ ID NO: 708 - protein, 677 aa, synthetic construct; identical to SEQ ID NO: 114
  REGION 1..677: note = Synthetic

SEQ ID NO: 709 - protein, 677 aa, synthetic construct; identical to SEQ ID NO: 115
  REGION 1..677: note = Synthetic

SEQ ID NO: 710 - protein, 677 aa, synthetic construct; identical to SEQ ID NO: 116
  REGION 1..677: note = Synthetic

SEQ ID NO: 711 - protein, 677 aa, synthetic construct; identical to SEQ ID NO: 117
  REGION 1..677: note = Synthetic

SEQ ID NO: 712 - protein, 677 aa, synthetic construct; identical to SEQ ID NO: 118
  REGION 1..677: note = Synthetic

SEQ ID NO: 713 - protein, 677 aa, synthetic construct; identical to SEQ ID NO: 119
  REGION 1..677: note = Synthetic

SEQ ID NO: 714 - protein, 677 aa, synthetic construct; identical to SEQ ID NO: 120
  REGION 1..677: note = Synthetic

SEQ ID NO: 715 - protein, 677 aa, synthetic construct; identical to SEQ ID NO: 121
  REGION 1..677: note = Synthetic

SEQ ID NO: 716 - protein, 677 aa, synthetic construct; identical to SEQ ID NO: 122
  REGION 1..677: note = Synthetic

SEQ ID NO: 717 - DNA, 100 bp, synthetic construct
  misc_feature 1..100: note = Synthetic
  source 1..100: mol_type = other DNA
gcttctccagccctggcctgggtcaatccttggggcccagactgagcacgtgttggcagaggaaaggaagccctgcttcctccagagggcgtcgcaggac

SEQ ID NO: 718 - DNA, 100 bp, synthetic construct
  misc_feature 1..100: note = Synthetic
  source 1..100: mol_type = other DNA
gcttctccagccctggcctgggtcaatccttggggcccagactgagcacgtgttttcagaggaaaggaagccctgcttcctccagagggcgtcgcaggac

SEQ ID NO: 719 - DNA, 100 bp, synthetic construct
  misc_feature 1..100: note = Synthetic
  source 1..100: mol_type = other DNA
gcttctccagccctggcctgggtcaatccttggggcccagactgagcacgggatggcagaggaaaggaagccctgcttcctccagagggcgtcgcaggac

SEQ ID NO: 720 - DNA, 100 bp, synthetic construct
  misc_feature 1..100: note = Synthetic
  source 1..100: mol_type = other DNA
gcttctccagccctggcctgggtcaatccttggggcccagactgagcacgtgctggcagaggaaaggaagccctgcttcctccagagggcgtcgcaggac

SEQ ID NO: 721 - DNA, 103 bp, synthetic construct
  misc_feature 1..103: note = Synthetic
  source 1..103: mol_type = other DNA
gcttctccagccctggcctgggtcaatccttggggcccagactgagcacgctttgatggcagaggaaaggaagccctgcttcctccagagggcgtcgcaggac

SEQ ID NO: 722 - DNA, 100 bp, synthetic construct
  misc_feature 1..100: note = Synthetic
  source 1..100: mol_type = other DNA
cccagtttacacgtctcatatgccccttggcagtcatcttagtcattacatgaggtgttcgttgtaactcatataaactgagttcccatgttttgcttaa

SEQ ID NO: 723 - DNA, 100 bp, synthetic construct
  misc_feature 1..100: note = Synthetic
  source 1..100: mol_type = other DNA
cccagtttacacgtctcatatgccccttggcagtcatcttagtcattacgtgaggtgttcgttgtaactcatataaactgagttcccatgttttgcttaa

SEQ ID NO: 724 - DNA, 100 bp, synthetic construct
  misc_feature 1..100: note = Synthetic
  source 1..100: mol_type = other DNA
cagtttacacgtctcatatgccccttggcagtcatcttagtcattacgtactgaggtgttcgttgtaactcatataaactgagttcccatgttttgctta

SEQ ID NO: 725 - DNA, 100 bp, synthetic construct
  misc_feature 1..100: note = Synthetic
  source 1..100: mol_type = other DNA
acttcatccacgttcaccttgccccacagggcagtaacggcagacttctccacaggagtcagatgcaccatggtgtctgtttgaggttgctagtgaacac

SEQ ID NO: 726 - DNA, 100 bp, synthetic construct
  misc_feature 1..100: note = Synthetic
  source 1..100: mol_type = other DNA
acttcatccacgttcaccttgccccacagggcagtaacggcagacttctcctcaggagtcaggtgcaccatggtgtctgtttgaggttgctagtgaacac

SEQ ID NO: 727 - DNA, 100 bp, synthetic construct
  misc_feature 1..100: note = Synthetic
  source 1..100: mol_type = other DNA
gtgttcactagcaacctcaaacagacaccatggtgcacctgactcctgaggagaagtctgccgttactgccctgtggggcaaggtgaacgtggatgaagt

SEQ ID NO: 728 - DNA, 100 bp, synthetic construct
  misc_feature 1..100: note = Synthetic
  source 1..100: mol_type = other DNA
gtgttcactagcaacctcaaacagacaccatggtgcacctgactcctgatgagaagtctgccgttactgccctgtggggcaaggtgaacgtggatgaagt

SEQ ID NO: 729 - DNA, 100 bp, synthetic construct
  misc_feature 1..100: note = Synthetic
  source 1..100: mol_type = other DNA
cacatggctggtgctgcagcagctggggcagtggtggggggccttggcgtctacatgctgggaagtgccatgagcaggcccatcatacatttcggcagtg

SEQ ID NO: 730 - DNA, 9224 bp, synthetic construct
  misc_feature 1..9224: note = Synthetic
  source 1..9224: mol_type = other DNA
atgtctaaaggtgaagaattattcactggtgttgtcccaattttggttgaattagatggtgatgttaatggtcacaaattttctgtctccggtgaaggtgaaggtgatgctacttacggtaaattgaccttaaaatttatttgtactactggtaaattgccagttccatggccaaccttagtcactactttcggttatggtgttcaatgttttgctagatacccagatcatatgaaacaacatgactttttcaagtctgccatgccagaaggttatgttcaagaaagaactatttttttcaaagatgacggtaactacaagaccagagctgaagtcaagtttgaaggtgataccttagttaatagaatcgaattaaaaggtattgattttaaagaagatggtaacattttaggtcacaaattggaatacaactataactctcacaatgtttacatcatggctgacaaacaaaagaatggtatcaaagttaacttcaaaattagacacaacattgaagatggttctgttcaattagctgaccattatcaacaaaatactccaattggtgatggtccagtcttgttaccagacaaccattacttatccactcaatctgccttatccaaagatccaaacgaaaagagagaccacatggtcttgttagaatttgttactgctgctggtattacccatggtatggatgaattgtacaaagctagcaacctgggtcaatccttggggcccagactgagcacgtgatggcagagcacaggagacgtcatggtttcaaaaggtgaagaagataatatggctattattaaagaatttatgagatttaaagttcatatggaaggttcagttaatggtcatgaatttgaaattgaaggtgaaggtgaaggtagaccatatgaaggtactcaaactgctaaattgaaagttactaaaggtggtccattaccatttgcttgggatattttgtcaccacaatttatgtatggttcaaaagcttatgttaaacatccagctgatattccagattatttaaaattgtcatttccagaaggttttaaatgggaaagagttatgaattttgaagatggtggtgttgttactgttactcaagattcatcattacaagatggtgaatttatttataaagttaaattgagaggtactaattttccatcagatggtccagttatgcaaaaaaaaactatgggttgggaagcttcatcagaaagaatgtatccagaagatggtgctttaaaaggtgaaattaaacaaagattgaaattaaaagatggtggtcattatgatgctgaagttaaaactacttataaagctaaaaaaccagttcaattaccaggtgcttataatgttaatattaaattggatattacttcacataatgaagattatactattgttgaacaatatgaaagagctgaaggtagacattcaactggtggtatggatgaattatataaaggtaccgctcgagcagctgtgattgattgagtcgacttggttgaacacgttgccaaggcttaagtgaatttactttaaatcttgcatttaaataaattttctttttatagctttatgacttagtttcaatttatatactattttaatgacattttcgattcggatccactagttctagagcggccgccaccgcggtggagctccagcttttgttccctttagtgagggttaattgcgcgcttggcgtaatcatggtcatagctgtttcctgtgtgaaattgttatccgctcacaattccacacaacataggagccggaagcataaagtgtaaagcctggggtgcctaatgagtgaggtaactcacattaattgcgttgcgctcactgcccgctttccagtcgggaaacctgtcgtgccagctgcattaatgaatcggccaacgcgcggggagaggcggtttgcgtattgggcgctcttccgcttcctcgctcactgactcgctgcgctcggtcgttcggctgcggcgagcggtatcagctcactcaaaggcggtaatacggttatccacagaatcaggggataacgcaggaaagaacatgtgagcaaaaggccagcaaaaggccaggaaccgtaaaaaggccgcgttgctggcgtttttccataggctccgcccccctgacgagcatcacaaaaatcgacgctcaagtcagaggtggcgaaacccgacaggactataaagataccaggcgtttccccctggaagctccctcgtgcgctctcctgttccgaccctgccgcttaccggatacctgtccgcctttctcccttcgggaagcgtggcgctttctcatagctcacgctgtaggtatctcagttcggtgtaggtcgttcgctccaagctgggctgtgtgcacgaaccccccgttcagcccgaccgctgcgccttatccggtaactatcgtcttgagtccaacccggtaagacacgacttatcgccactggcagcagccactggtaacaggattagcagagcgaggtatgtaggcggtgctacagagttcttgaagtggtggcctaactacggctacactagaaggacagtatttggtatctgcgctctgctgaagccagttaccttcggaaaaagagttggtagctcttgatccggcaaacaaaccaccgctggtagcggtggtttttttgtttgcaagcagcagattacgcgcagaaaaaaaggatctcaagaagatcctttgatcttttctacggggtctgacgctcagtggaacgaaaactcacgttaagggattttggtcatgagattatcaaaaaggatcttcacctagatccttttaaattaaaaatgaagttttaaatcaatctaaagtatatatgagtaaacttggtctgacagttaccaatgcttaatcagtgaggcacctatctcagcgatctgtctatttcgttcatccatagttgcctgactccccgtcgtgtagataactacgatacgggagggcttaccatctggccccagtgctgcaatgataccgcgagacccacgctcaccggctccagatttatcagcaataaaccagccagccggaagggccgagcgcagaagtggtcctgcaactttatccgcctccatccagtctattaattgttgccgggaagctagagtaagtagttcgccagttaatagtttgcgcaacgttgttgccattgctacaggcatcgtggtgtcacgctcgtcgtttggtatggcttcattcagctccggttcccaacgatcaaggcgagttacatgatcccccatgttgtgcaaaaaagcggttagctccttcggtcctccgatcgttgtcagaagtaagttggccgcagtgttatcactcatggttatggcagcactgcataattctcttactgtcatgccatccgtaagatgcttttctgtgactggtgagtactcaaccaagtcattctgagaatagtgtatgcggcgaccgagttgctcttgcccggcgtcaatacgggataataccgcgccacatagcagaactttaaaagtgctcatcattggaaaacgttcttcggggcgaaaactctcaaggatcttaccgctgttgagatccagttcgatgtaacccactcgtgcacccaactgatcttcagcatcttttactttcaccagcgtttctgggtgagcaaaaacaggaaggcaaaatgccgcaaaaaagggaataagggcgacacggaaatgttgaatactcatactcttcctttttcaatattattgaagcatttatcagggttattgtctcatgagcggatacatatttgaatgtatttagaaaaataaacaaataggggttccgcgcacatttccccgaaaagtgccacctgaacgaagcatctgtgcttcattttgtagaacaaaaatgcaacgcgagagcgctaatttttcaaacaaagaatctgagctgcatttttacagaacagaaatgcaacgcgaaagcgctattttaccaacgaagaatctgtgcttcatttttgtaaaacaaaaatgcaacgcgagagcgctaatttttcaaacaaagaatctgagctgcatttttacagaacagaaatgcaacgcgagagcgctattttaccaacaaagaatctatacttcttttttgttctacaaaaatgcatcccgagagcgctatttttctaacaaagcatcttagattactttttttctcctttgtgcgctctataatgcagtctcttgataactttttgcactgtaggtccgttaaggttagaagaaggctactttggtgtctattttctcttccataaaaaaagcctgactccacttcccgcgtttactgattactagcgaagctgcgggtgcattttttcaagataaaggcatccccgattatattctataccgatgtggattgcgcatactttgtgaacagaaagtgatagcgttgatgattcttcattggtcagaaaattatgaacggtttcttctattttgtctctatatactacgtataggaaatgtttacattttcgtattgttttcgattcactctatgaatagttcttactacaatttttttgtctaaagagtaatactagagataaacataaaaaatgtagaggtcgagtttagatgcaagttcaaggagcgaaaggtggatgggtaggttatatagggatatagcacagagatatatagcaaagagatacttttgagcaatgtttgtggaagcggtattcgcaatattttagtagctcgttacagtccggtgcgtttttggttttttgaaagtgcgtcttcagagcgcttttggttttcaaaagcgctctgaagttcctatactttctagagaataggaacttcggaataggaacttcaaagcgtttccgaaaacgagcgcttccgaaaatgcaacgcgagctgcgcacatacagctcactgttcacgtcgcacctatatctgcgtgttgcctgtatatatatatacatgagaagaacggcatagtgcgtgtttatgcttaaatgcgtacttatatgcgtctatttatgtaggatgaaaggtagtctagtacctcctgtgatattatcccattccatgcggggtatcgtatgcttccttcagcactaccctttagctgttctatatgctgccactcctcaattggattagtctcatccttcaatgctatcatttcctttgatattggatcatactaagaaaccattattatcatgacattaacctataaaaataggcgtatcacgaggccctttcgtctcgcgcgtttcggtgatgacggtgaaaacctctgacacatgcagctcccggagacggtcacagcttgtctgtaagcggatgccgggagcagacaagcccgtcagggcgcgtcagcgggtgttggcgggtgtcggggctggcttaactatgcggcatcagagcagattgtactgagagtgcaccatatcgactacgtcgtaaggccgtttctgacagagtaaaattcttgagggaactttcaccattatgggaaatgcttcaagaaggtattgacttaaactccatcaaatggtcaggtcattgagtgttttttatttgttgtatttttttttttttagagaaaatcctccaatatcaaattaggaatcgtagtttcatgattttctgttacacctaactttttgtgtggtgccctcctccttgtcaatattaatgttaaagtgcaattctttttccttatcacgttgagccattagtatcaatttgcttacctgtattcctttactatcctcctttttctccttcttgataaatgtatgtagattgcgtatatagtttcgtctaccctatgaacatattccattttgtaatttcgtgtcgtttctattatgaatttcatttataaagtttatgtacaaatatcataaaaaaagagaatctttttaagcaaggattttcttaacttcttcggcgacagcatcaccgacttcggtggtactgttggaaccacctaaatcaccagttctgatacctgcatccaaaacctttttaactgcatcttcaatggccttaccttcttcaggcaagttcaatgacaatttcaacatcattgcagcagacaagatagtggcgatagggtcaaccttattctttggcaaatctggagcagaaccgtggcatggttcgtacaaaccaaatgcggtgttcttgtctggcaaagaggccaaggacgcagatggcaacaaacccaaggaacctgggataacggaggcttcatcggagatgatatcaccaaacatgttgctggtgattataataccatttaggtgggttgggttcttaactaggatcatggcggcagaatcaatcaattgatgttgaaccttcaatgtagggaattcgttcttgatggtttcctccacagtttttctccataatcttgaagaggccaaaagattagctttatccaaggaccaaataggcaatggtggctcatgttgtagggccatgaaagcggccattcttgtgattctttgcacttctggaacggtgtattgttcactatcccaagcgacaccatcaccatcgtcttcctttctcttaccaaagtaaatacctcccactaattctctgacaacaacgaagtcagtacctttagcaaattgtggcttgattggagataagtctaaaagagagtcggatgcaaagttacatggtcttaagttggcgtacaattgaagttctttacggatttttagtaaaccttgttcaggtctaacactaccggtaccccatttaggaccagccacagcacctaacaaaacggcatcaaccttcttggaggcttccagcgcctcatctggaagtgggacacctgtagcatcgatagcagcaccaccaattaaatgattttcgaaatcgaacttgacattggaacgaacatcagaaatagctttaagaaccttaatggcttcggctgtgatttcttgaccaacgtggtcacctggcaaaacgacgatcttcttaggggcagacataggggcagacattagaatggtatatccttgaaatatatatatatattgctgaaatgtaaaaggtaagaaaagttagaaagtaagacgattgctaaccacctattggaaaaaacaataggtccttaaataatattgtcaacttcaagtattgtgatgcaagcatttagtcatgaacgcttctctattctatatgaaaagccggttccggcctctcacctttcctttttctcccaatttttcagttgaaaaaggtatatgcgtcaggcgacctctgaaattaacaaaaaatttccagtcatcgaatttgattctgtgcgatagcgcccctgtgtgttctcgttatgttgaggaaaaaaataatggttgctaagagattcgaactcttgcatcttacgatacctgagtattcccacagttaactgcggtcaagatatttcttgaatcaggcgccttagaccgctcggccaaacaaccaattacttgttgagaaatagagtataattatcctataaatataacgtttttgaacacacatgaacaaggaagtacaggacaattgattttgaagagaatgtggattttgatgtaattgttgggattccatttttaataaggcaataatattaggtatgtggatatactagaagttctcctcgaccgtcgatatgcggtgtgaaataccgcacagatgcgtaaggagaaaataccgcatcaggaaattgtaaacgttaatattttgttaaaattcgcgttaaatttttgttaaatcagctcattttttaaccaataggccgaaatcggcaaaatcccttataaatcaaaagaatagaccgagatagggttgagtgttgttccagtttggaacaagagtccactattaaagaacgtggactccaacgtcaaagggcgaaaaaccgtctatcagggcgatggcccactacgtgaaccatcaccctaatcaagttttttggggtcgaggtgccgtaaagcactaaatcggaaccctaaagggagcccccgatttagagcttgacggggaaagccggcgaacgtggcgagaaaggaagggaagaaagcgaaaggagcgggcgctagggcgctggcaagtgtagcggtcacgctgcgcgtaaccaccacacccgccgcgcttaatgcgccgctacagggcgcgtcgcgccattcgccattcaggctgcgcaactgttgggaagggcgatcggtgcgggcctcttcgctattacgccagctggcgaaagggggatgtgctgcaaggcgattaagttgggtaacgccagggttttcccagtcacgacgttgtaaaacgacggccagtgagcgcgcgtaatacgactcactatagggcgaattgggtaccgggccccccctcgaggtcgacggtatcgataagcttgatatcgaattcctgcagcccgggggatccgttagaatcattttgaataaaaaacacgctttttcagttcgagtttatcattatcaatactgccatttcaaagaatacgtaaataattaatagtagtgattttcctaactttatttagtcaaaaaattagccttttaattctgctgtaacccgtacatgcccaaaatagggggcgggttacacagaatatataacatcgtaggtgtctgggtgaacagtttattcctggcatccactaaatataatggagcccgctttttaagctggcatccagaaaaaaaaagaatcccagcaccaaaatattgttttcttcaccaaccatcagttcataggtccattctcttagcgcaactacagagaacaggggcacaaacaggcaaaaaacgggcacaacctcaatggagtgatgcaacctgcctggagtaaatgatgacacaaggcaattgacccacgcatgtatctatctcattttcttacaccttctattaccttctgctctctctgatttggaaaaagctgaaaaaaaaggttgaaaccagttccctgaaattattcccctacttgactaataagtatataaagacggtaggtattgattgtaattctgtaaatctatttcttaaacttcttaaattctacttttatagttagtcttttttttagttttaaaacaccaagaacttagtttcgaataaacacacataaacaaacaaagaattc

SEQ ID NO: 731 - DNA, 9225 bp, synthetic construct
  misc_feature 1..9225: note = Synthetic
  source 1..9225: mol_type = other DNA
atgtctaaaggtgaagaattattcactggtgttgtcccaattttggttgaattagatggtgatgttaatggtcacaaattttctgtctccggtgaaggtgaaggtgatgctacttacggtaaattgaccttaaaatttatttgtactactggtaaattgccagttccatggccaaccttagtcactactttcggttatggtgttcaatgttttgctagatacccagatcatatgaaacaacatgactttttcaagtctgccatgccagaaggttatgttcaagaaagaactatttttttcaaagatgacggtaactacaagaccagagctgaagtcaagtttgaaggtgataccttagttaatagaatcgaattaaaaggtattgattttaaagaagatggtaacattttaggtcacaaattggaatacaactataactctcacaatgtttacatcatggctgacaaacaaaagaatggtatcaaagttaacttcaaaattagacacaacattgaagatggttctgttcaattagctgaccattatcaacaaaatactccaattggtgatggtccagtcttgttaccagacaaccattacttatccactcaatctgccttatccaaagatccaaacgaaaagagagaccacatggtcttgttagaatttgttactgctgctggtattacccatggtatggatgaattgtacaaagctagcaaacctgggtcaatccttggggcccagactgagcacgtgatggcagagcacaggagacgtcatggtttcaaaaggtgaagaagataatatggctattattaaagaatttatgagatttaaagttcatatggaaggttcagttaatggtcatgaatttgaaattgaaggtgaaggtgaaggtagaccatatgaaggtactcaaactgctaaattgaaagttactaaaggtggtccattaccatttgcttgggatattttgtcaccacaatttatgtatggttcaaaagcttatgttaaacatccagctgatattccagattatttaaaattgtcatttccagaaggttttaaatgggaaagagttatgaattttgaagatggtggtgttgttactgttactcaagattcatcattacaagatggtgaatttatttataaagttaaattgagaggtactaattttccatcagatggtccagttatgcaaaaaaaaactatgggttgggaagcttcatcagaaagaatgtatccagaagatggtgctttaaaaggtgaaattaaacaaagattgaaattaaaagatggtggtcattatgatgctgaagttaaaactacttataaagctaaaaaaccagttcaattaccaggtgcttataatgttaatattaaattggatattacttcacataatgaagattatactattgttgaacaatatgaaagagctgaaggtagacattcaactggtggtatggatgaattatataaaggtaccgctcgagcagctgtgattgattgagtcgacttggttgaacacgttgccaaggcttaagtgaatttactttaaatcttgcatttaaataaattttctttttatagctttatgacttagtttcaatttatatactattttaatgacattttcgattcggatccactagttctagagcggccgccaccgcggtggagctccagcttttgttccctttagtgagggttaattgcgcgcttggcgtaatcatggtcatagctgtttcctgtgtgaaattgttatccgctcacaattccacacaacataggagccggaagcataaagtgtaaagcctggggtgcctaatgagtgaggtaactcacattaattgcgttgcgctcactgcccgctttccagtcgggaaacctgtcgtgccagctgcattaatgaatcggccaacgcgcggggagaggcggtttgcgtattgggcgctcttccgcttcctcgctcactgactcgctgcgctcggtcgttcggctgcggcgagcggtatcagctcactcaaaggcggtaatacggttatccacagaatcaggggataacgcaggaaagaacatgtgagcaaaaggccagcaaaaggccaggaaccgtaaaaaggccgcgttgctggcgtttttccataggctccgcccccctgacgagcatcacaaaaatcgacgctcaagtcagaggtggcgaaacccgacaggactataaagataccaggcgtttccccctggaagctccctcgtgcgctctcctgttccgaccctgccgcttaccggatacctgtccgcctttctcccttcgggaagcgtggcgctttctcatagctcacgctgtaggtatctcagttcggtgtaggtcgttcgctccaagctgggctgtgtgcacgaaccccccgttcagcccgaccgctgcgccttatccggtaactatcgtcttgagtccaacccggtaagacacgacttatcgccactggcagcagccactggtaacaggattagcagagcgaggtatgtaggcggtgctacagagttcttgaagtggtggcctaactacggctacactagaaggacagtatttggtatctgcgctctgctgaagccagttaccttcggaaaaagagttggtagctcttgatccggcaaacaaaccaccgctggtagcggtggtttttttgtttgcaagcagcagattacgcgcagaaaaaaaggatctcaagaagatcctttgatcttttctacggggtctgacgctcagtggaacgaaaactcacgttaagggattttggtcatgagattatcaaaaaggatcttcacctagatccttttaaattaaaaatgaagttttaaatcaatctaaagtatatatgagtaaacttggtctgacagttaccaatgcttaatcagtgaggcacctatctcagcgatctgtctatttcgttcatccatagttgcctgactccccgtcgtgtagataactacgatacgggagggcttaccatctggccccagtgctgcaatgataccgcgagacccacgctcaccggctccagatttatcagcaataaaccagccagccggaagggccgagcgcagaagtggtcctgcaactttatccgcctccatccagtctattaattgttgccgggaagctagagtaagtagttcgccagttaatagtttgcgcaacgttgttgccattgctacaggcatcgtggtgtcacgctcgtcgtttggtatggcttcattcagctccggttcccaacgatcaaggcgagttacatgatcccccatgttgtgcaaaaaagcggttagctccttcggtcctccgatcgttgtcagaagtaagttggccgcagtgttatcactcatggttatggcagcactgcataattctcttactgtcatgccatccgtaagatgcttttctgtgactggtgagtactcaaccaagtcattctgagaatagtgtatgcggcgaccgagttgctcttgcccggcgtcaatacgggataataccgcgccacatagcagaactttaaaagtgctcatcattggaaaacgttcttcggggcgaaaactctcaaggatcttaccgctgttgagatccagttcgatgtaacccactcgtgcacccaactgatcttcagcatcttttactttcaccagcgtttctgggtgagcaaaaacaggaaggcaaaatgccgcaaaaaagggaataagggcgacacggaaatgttgaatactcatactcttcctttttcaatattattgaagcatttatcagggttattgtctcatgagcggatacatatttgaatgtatttagaaaaataaacaaataggggttccgcgcacatttccccgaaaagtgccacctgaacgaagcatctgtgcttcattttgtagaacaaaaatgcaacgcgagagcgctaatttttcaaacaaagaatctgagctgcatttttacagaacagaaatgcaacgcgaaagcgctattttaccaacgaagaatctgtgcttcatttttgtaaaacaaaaatgcaacgcgagagcgctaatttttcaaacaaagaatctgagctgcatttttacagaacagaaatgcaacgcgagagcgctattttaccaacaaagaatctatacttcttttttgttctacaaaaatgcatcccgagagcgctatttttctaacaaagcatcttagattactttttttctcctttgtgcgctctataatgcagtctcttgataactttttgcactgtaggtccgttaaggttagaagaaggctactttggtgtctattttctcttccataaaaaaagcctgactccacttcccgcgtttactgattactagcgaagctgcgggtgcattttttcaagataaaggcatccccgattatattctataccgatgtggattgcgcatactttgtgaacagaaagtgatagcgttgatgattcttcattggtcagaaaattatgaacggtttcttctattttgtctctatatactacgtataggaaatgtttacattttcgtattgttttcgattcactctatgaatagttcttactacaatttttttgtctaaagagtaatactagagataaacataaaaaatgtagaggtcgagtttagatgcaagttcaaggagcgaaaggtggatgggtaggttatatagggatatagcacagagatatatagcaaagagatacttttgagcaatgtttgtggaagcggtattcgcaatattttagtagctcgttacagtccggtgcgtttttggttttttgaaagtgcgtcttcagagcgcttttggttttcaaaagcgctctgaagttcctatactttctagagaataggaacttcggaataggaacttcaaagcgtttccgaaaacgagcgcttccgaaaatgcaacgcgagctgcgcacatacagctcactgttcacgtcgcacctatatctgcgtgttgcctgtatatatatatacatgagaagaacggcatagtgcgtgtttatgcttaaatgcgtacttatatgcgtctatttatgtaggatgaaaggtagtctagtacctcctgtgatattatcccattccatgcggggtatcgtatgcttccttcagcactaccctttagctgttctatatgctgccactcctcaattggattagtctcatccttcaatgctatcatttcctttgatattggatcatactaagaaaccattattatcatgacattaacctataaaaataggcgtatcacgaggccctttcgtctcgcgcgtttcggtgatgacggtgaaaacctctgacacatgcagctcccggagacggtcacagcttgtctgtaagcggatgccgggagcagacaagcccgtcagggcgcgtcagcgggtgttggcgggtgtcggggctggcttaactatgcggcatcagagcagattgtactgagagtgcaccatatcgactacgtcgtaaggccgtttctgacagagtaaaattcttgagggaactttcaccattatgggaaatgcttcaagaaggtattgacttaaactccatcaaatggtcaggtcattgagtgttttttatttgttgtatttttttttttttagagaaaatcctccaatatcaaattaggaatcgtagtttcatgattttctgttacacctaactttttgtgtggtgccctcctccttgtcaatattaatgttaaagtgcaattctttttccttatcacgttgagccattagtatcaatttgcttacctgtattcctttactatcctcctttttctccttcttgataaatgtatgtagattgcgtatatagtttcgtctaccctatgaacatattccattttgtaatttcgtgtcgtttctattatgaatttcatttataaagtttatgtacaaatatcataaaaaaagagaatctttttaagcaaggattttcttaacttcttcggcgacagcatcaccgacttcggtggtactgttggaaccacctaaatcaccagttctgatacctgcatccaaaacctttttaactgcatcttcaatggccttaccttcttcaggcaagttcaatgacaatttcaacatcattgcagcagacaagatagtggcgatagggtcaaccttattctttggcaaatctggagcagaaccgtggcatggttcgtacaaaccaaatgcggtgttcttgtctggcaaagaggccaaggacgcagatggcaacaaacccaaggaacctgggataacggaggcttcatcggagatgatatcaccaaacatgttgctggtgattataataccatttaggtgggttgggttcttaactaggatcatggcggcagaatcaatcaattgatgttgaaccttcaatgtagggaattcgttcttgatggtttcctccacagtttttctccataatcttgaagaggccaaaagattagctttatccaaggaccaaataggcaatggtggctcatgttgtagggccatgaaagcggccattcttgtgattctttgcacttctggaacggtgtattgttcactatcccaagcgacaccatcaccatcgtcttcctttctcttaccaaagtaaatacctcccactaattctctgacaacaacgaagtcagtacctttagcaaattgtggcttgattggagataagtctaaaagagagtcggatgcaaagttacatggtcttaagttggcgtacaattgaagttctttacggatttttagtaaaccttgttcaggtctaacactaccggtaccccatttaggaccagccacagcacctaacaaaacggcatcaaccttcttggaggcttccagcgcctcatctggaagtgggacacctgtagcatcgatagcagcaccaccaattaaatgattttcgaaatcgaacttgacattggaacgaacatcagaaatagctttaagaaccttaatggcttcggctgtgatttcttgaccaacgtggtcacctggcaaaacgacgatcttcttaggggcagacataggggcagacattagaatggtatatccttgaaatatatatatatattgctgaaatgtaaaaggtaagaaaagttagaaagtaagacgattgctaaccacctattggaaaaaacaataggtccttaaataatattgtcaacttcaagtattgtgatgcaagcatttagtcatgaacgcttctctattctatatgaaaagccggttccggcctctcacctttcctttttctcccaatttttcagttgaaaaaggtatatgcgtcaggcgacctctgaaattaacaaaaaatttccagtcatcgaatttgattctgtgcgatagcgcccctgtgtgttctcgttatgttgaggaaaaaaataatggttgctaagagattcgaactcttgcatcttacgatacctgagtattcccacagttaactgcggtcaagatatttcttgaatcaggcgccttagaccgctcggccaaacaaccaattacttgttgagaaatagagtataattatcctataaatataacgtttttgaacacacatgaacaaggaagtacaggacaattgattttgaagagaatgtggattttgatgtaattgttgggattccatttttaataaggcaataatattaggtatgtggatatactagaagttctcctcgaccgtcgatatgcggtgtgaaataccgcacagatgcgtaaggagaaaataccgcatcaggaaattgtaaacgttaatattttgttaaaattcgcgttaaatttttgttaaatcagctcattttttaaccaataggccgaaatcggcaaaatcccttataaatcaaaagaatagaccgagatagggttgagtgttgttccagtttggaacaagagtccactattaaagaacgtggactccaacgtcaaagggcgaaaaaccgtctatcagggcgatggcccactacgtgaaccatcaccctaatcaagttttttggggtcgaggtgccgtaaagcactaaatcggaaccctaaagggagcccccgatttagagcttgacggggaaagccggcgaacgtggcgagaaaggaagggaagaaagcgaaaggagcgggcgctagggcgctggcaagtgtagcggtcacgctgcgcgtaaccaccacacccgccgcgcttaatgcgccgctacagggcgcgtcgcgccattcgccattcaggctgcgcaactgttgggaagggcgatcggtgcgggcctcttcgctattacgccagctggcgaaagggggatgtgctgcaaggcgattaagttgggtaacgccagggttttcccagtcacgacgttgtaaaacgacggccagtgagcgcgcgtaatacgactcactatagggcgaattgggtaccgggccccccctcgaggtcgacggtatcgataagcttgatatcgaattcctgcagcccgggggatccgttagaatcattttgaataaaaaacacgctttttcagttcgagtttatcattatcaatactgccatttcaaagaatacgtaaataattaatagtagtgattttcctaactttatttagtcaaaaaattagccttttaattctgctgtaacccgtacatgcccaaaatagggggcgggttacacagaatatataacatcgtaggtgtctgggtgaacagtttattcctggcatccactaaatataatggagcccgctttttaagctggcatccagaaaaaaaaagaatcccagcaccaaaatattgttttcttcaccaaccatcagttcataggtccattctcttagcgcaactacagagaacaggggcacaaacaggcaaaaaacgggcacaacctcaatggagtgatgcaacctgcctggagtaaatgatgacacaaggcaattgacccacgcatgtatctatctcattttcttacaccttctattaccttctgctctctctgatttggaaaaagctgaaaaaaaaggttgaaaccagttccctgaaattattcccctacttgactaataagtatataaagacggtaggtattgattgtaattctgtaaatctatttcttaaacttcttaaattctacttttatagttagtcttttttttagttttaaaacaccaagaacttagtttcgaataaacacacataaacaaacaaagaattc

SEQ ID NO: 732 - DNA, 9223 bp, synthetic construct
  misc_feature 1..9223: note = Synthetic
  source 1..9223: mol_type = other DNA
atgtctaaaggtgaagaattattcactggtgttgtcccaattttggttgaattagatggtgatgttaatggtcacaaattttctgtctccggtgaaggtgaaggtgatgctacttacggtaaattgaccttaaaatttatttgtactactggtaaattgccagttccatggccaaccttagtcactactttcggttatggtgttcaatgttttgctagatacccagatcatatgaaacaacatgactttttcaagtctgccatgccagaaggttatgttcaagaaagaactatttttttcaaagatgacggtaactacaagaccagagctgaagtcaagtttgaaggtgataccttagttaatagaatcgaattaaaaggtattgattttaaagaagatggtaacattttaggtcacaaattggaatacaactataactctcacaatgtttacatcatggctgacaaacaaaagaatggtatcaaagttaacttcaaaattagacacaacattgaagatggttctgttcaattagctgaccattatcaacaaaatactccaattggtgatggtccagtcttgttaccagacaaccattacttatccactcaatctgccttatccaaagatccaaacgaaaagagagaccacatggtcttgttagaatttgttactgctgctggtattacccatggtatggatgaattgtacaaagctagcaaacctgggtcaatccttggggcccagactgagcacgtgatggcagagcacaggacgtcatggtttcaaaaggtgaagaagataatatggctattattaaagaatttatgagatttaaagttcatatggaaggttcagttaatggtcatgaatttgaaattgaaggtgaaggtgaaggtagaccatatgaaggtactcaaactgctaaattgaaagttactaaaggtggtccattaccatttgcttgggatattttgtcaccacaatttatgtatggttcaaaagcttatgttaaacatccagctgatattccagattatttaaaattgtcatttccagaaggttttaaatgggaaagagttatgaattttgaagatggtggtgttgttactgttactcaagattcatcattacaagatggtgaatttatttataaagttaaattgagaggtactaattttccatcagatggtccagttatgcaaaaaaaaactatgggttgggaagcttcatcagaaagaatgtatccagaagatggtgctttaaaaggtgaaattaaacaaagattgaaattaaaagatggtggtcattatgatgctgaagttaaaactacttataaagctaaaaaaccagttcaattaccaggtgcttataatgttaatattaaattggatattacttcacataatgaagattatactattgttgaacaatatgaaagagctgaaggtagacattcaactggtggtatggatgaattatataaaggtaccgctcgagcagctgtgattgattgagtcgacttggttgaacacgttgccaaggcttaagtgaatttactttaaatcttgcatttaaataaattttctttttatagctttatgacttagtttcaatttatatactattttaatgacattttcgattcggatccactagttctagagcggccgccaccgcggtggagctccagcttttgttccctttagtgagggttaattgcgcgcttggcgtaatcatggtcatagctgtttcctgtgtgaaattgttatccgctcacaattccacacaacataggagccggaagcataaagtgtaaagcctggggtgcctaatgagtgaggtaactcacattaattgcgttgcgctcactgcccgctttccagtcgggaaacctgtcgtgccagctgcattaatgaatcggccaacgcgcggggagaggcggtttgcgtattgggcgctcttccgcttcctcgctcactgactcgctgcgctcggtcgttcggctgcggcgagcggtatcagctcactcaaaggcggtaatacggttatccacagaatcaggggataacgcaggaaagaacatgtgagcaaaaggccagcaaaaggccaggaaccgtaaaaaggccgcgttgctggcgtttttccataggctccgcccccctgacgagcatcacaaaaatcgacgctcaagtcagaggtggcgaaacccgacaggactataaagataccaggcgtttccccctggaagctccctcgtgcgctctcctgttccgaccctgccgcttaccggatacctgtccgcctttctcccttcgggaagcgtggcgctttctcatagctcacgctgtaggtatctcagttcggtgtaggtcgttcgctccaagctgggctgtgtgcacgaaccccccgttcagcccgaccgctgcgccttatccggtaactatcgtcttgagtccaacccggtaagacacgacttatcgccactggcagcagccactggtaacaggattagcagagcgaggtatgtaggcggtgctacagagttcttgaagtggtggcctaactacggctacactagaaggacagtatttggtatctgcgctctgctgaagccagttaccttcggaaaaagagttggtagctcttgatccggcaaacaaaccaccgctggtagcggtggtttttttgtttgcaagcagcagattacgcgcagaaaaaaaggatctcaagaagatcctttgatcttttctacggggtctgacgctcagtggaacgaaaactcacgttaagggattttggtcatgagattatcaaaaaggatcttcacctagatccttttaaattaaaaatgaagttttaaatcaatctaaagtatatatgagtaaacttggtctgacagttaccaatgcttaatcagtgaggcacctatctcagcgatctgtctatttcgttcatccatagttgcctgactccccgtcgtgtagataactacgatacgggagggcttaccatctggccccagtgctgcaatgataccgcgagacccacgctcaccggctccagatttatcagcaataaaccagccagccggaagggccgagcgcagaagtggtcctgcaactttatccgcctccatccagtctattaattgttgccgggaagctagagtaagtagttcgccagttaatagtttgcgcaacgttgttgccattgctacaggcatcgtggtgtcacgctcgtcgtttggtatggcttcattcagctccggttcccaacgatcaaggcgagttacatgatcccccatgttgtgcaaaaaagcggttagctccttcggtcctccgatcgttgtcagaagtaagttggccgcagtgttatcactcatggttatggcagcactgcataattctcttactgtcatgccatccgtaagatgcttttctgtgactggtgagtactcaaccaagtcattctgagaatagtgtatgcggcgaccgagttgctcttgcccggcgtcaatacgggataataccgcgccacatagcagaactttaaaagtgctcatcattggaaaacgttcttcggggcgaaaactctcaaggatcttaccgctgttgagatccagttcgatgtaacccactcgtgcacccaactgatcttcagcatcttttactttcaccagcgtttctgggtgagcaaaaacaggaaggcaaaatgccgcaaaaaagggaataagggcgacacggaaatgttgaatactcatactcttcctttttcaatattattgaagcatttatcagggttattgtctcatgagcggatacatatttgaatgtatttagaaaaataaacaaataggggttccgcgcacatttccccgaaaagtgccacctgaacgaagcatctgtgcttcattttgtagaacaaaaatgcaacgcgagagcgctaatttttcaaacaaagaatctgagctgcatttttacagaacagaaatgcaacgcgaaagcgctattttaccaacgaagaatctgtgcttcatttttgtaaaacaaaaatgcaacgcgagagcgctaatttttcaaacaaagaatctgagctgcatttttacagaacagaaatgcaacgcgagagcgctattttaccaacaaagaatctatacttcttttttgttctacaaaaatgcatcccgagagcgctatttttctaacaaagcatcttagattactttttttctcctttgtgcgctctataatgcagtctcttgataactttttgcactgtaggtccgttaaggttagaagaaggctactttggtgtctattttctcttccataaaaaaagcctgactccacttcccgcgtttactgattactagcgaagctgcgggtgcattttttcaagataaaggcatccccgattatattctataccgatgtggattgcgcatactttgtgaacagaaagtgatagcgttgatgattcttcattggtcagaaaattatgaacggtttcttctattttgtctctatatactacgtataggaaatgtttacattttcgtattgttttcgattcactctatgaatagttcttactacaatttttttgtctaaagagtaatactagagataaacataaaaaatgtagaggtcgagtttagatgcaagttcaaggagcgaaaggtggatgggtaggttatatagggatatagcacagagatatatagcaaagagatacttttgagcaatgtttgtggaagcggtattcgcaatattttagtagctcgttacagtccggtgcgtttttggttttttgaaagtgcgtcttcagagcgcttttggttttcaaaagcgctctgaagttcctatactttctagagaataggaacttcggaataggaacttcaaagcgtttccgaaaacgagcgcttccgaaaatgcaacgcgagctgcgcacatacagctcactgttcacgtcgcacctatatctgcgtgttgcctgtatatatatatacatgagaagaacggcatagtgcgtgtttatgcttaaatgcgtacttatatgcgtctatttatgtaggatgaaaggtagtctagtacctcctgtgatattatcccattccatgcggggtatcgtatgcttccttcagcactaccctttagctgttctatatgctgccactcctcaattggattagtctcatccttcaatgctatcatttcctttgatattggatcatactaagaaaccattattatcatgacattaacctataaaaataggcgtatcacgaggccctttcgtctcgcgcgtttcggtgatgacggtgaaaacctctgacacatgcagctcccggagacggtcacagcttgtctgtaagcggatgccgggagcagacaagcccgtcagggcgcgtcagcgggtgttggcgggtgtcggggctggcttaactatgcggcatcagagcagattgtactgagagtgcaccatatcgactacgtcgtaaggccgtttctgacagagtaaaattcttgagggaactttcaccattatgggaaatgcttcaagaaggtattgacttaaactccatcaaatggtcaggtcattgagtgttttttatttgttgtatttttttttttttagagaaaatcctccaatatcaaattaggaatcgtagtttcatgattttctgttacacctaactttttgtgtggtgccctcctccttgtcaatattaatgttaaagtgcaattctttttccttatcacgttgagccattagtatcaatttgcttacctgtattcctttactatcctcctttttctccttcttgataaatgtatgtagattgcgtatatagtttcgtctaccctatgaacatattccattttgtaatttcgtgtcgtttctattatgaatttcatttataaagtttatgtacaaatatcataaaaaaagagaatctttttaagcaaggattttcttaacttcttcggcgacagcatcaccgacttcggtggtactgttggaaccacctaaatcaccagttctgatacctgcatccaaaacctttttaactgcatcttcaatggccttaccttcttcaggcaagttcaatgacaatttcaacatcattgcagcagacaagatagtggcgatagggtcaaccttattctttggcaaatctggagcagaaccgtggcatggttcgtacaaaccaaatgcggtgttcttgtctggcaaagaggccaaggacgcagatggcaacaaacccaaggaacctgggataacggaggcttcatcggagatgatatcaccaaacatgttgctggtgattataataccatttaggtgggttgggttcttaactaggatcatggcggcagaatcaatcaattgatgttgaaccttcaatgtagggaattcgttcttgatggtttcctccacagtttttctccataatcttgaagaggccaaaagattagctttatccaaggaccaaataggcaatggtggctcatgttgtagggccatgaaagcggccattcttgtgattctttgcacttctggaacggtgtattgttcactatcccaagcgacaccatcaccatcgtcttcctttctcttaccaaagtaaatacctcccactaattctctgacaacaacgaagtcagtacctttagcaaattgtggcttgattggagataagtctaaaagagagtcggatgcaaagttacatggtcttaagttggcgtacaattgaagttctttacggatttttagtaaaccttgttcaggtctaacactaccggtaccccatttaggaccagccacagcacctaacaaaacggcatcaaccttcttggaggcttccagcgcctcatctggaagtgggacacctgtagcatcgatagcagcaccaccaattaaatgattttcgaaatcgaacttgacattggaacgaacatcagaaatagctttaagaaccttaatggcttcggctgtgatttcttgaccaacgtggtcacctggcaaaacgacgatcttcttaggggcagacataggggcagacattagaatggtatatccttgaaatatatatatatattgctgaaatgtaaaaggtaagaaaagttagaaagtaagacgattgctaaccacctattggaaaaaacaataggtccttaaataatattgtcaacttcaagtattgtgatgcaagcatttagtcatgaacgcttctctattctatatgaaaagccggttccggcctctcacctttcctttttctcccaatttttcagttgaaaaaggtatatgcgtcaggcgacctctgaaattaacaaaaaatttccagtcatcgaatttgattctgtgcgatagcgcccctgtgtgttctcgttatgttgaggaaaaaaataatggttgctaagagattcgaactcttgcatcttacgatacctgagtattcccacagttaactgcggtcaagatatttcttgaatcaggcgccttagaccgctcggccaaacaaccaattacttgttgagaaatagagtataattatcctataaatataacgtttttgaacacacatgaacaaggaagtacaggacaattgattttgaagagaatgtggattttgatgtaattgttgggattccatttttaataaggcaataatattaggtatgtggatatactagaagttctcctcgaccgtcgatatgcggtgtgaaataccgcacagatgcgtaaggagaaaataccgcatcaggaaattgtaaacgttaatattttgttaaaattcgcgttaaatttttgttaaatcagctcattttttaaccaataggccgaaatcggcaaaatcccttataaatcaaaagaatagaccgagatagggttgagtgttgttccagtttggaacaagagtccactattaaagaacgtggactccaacgtcaaagggcgaaaaaccgtctatcagggcgatggcccactacgtgaaccatcaccctaatcaagttttttggggtcgaggtgccgtaaagcactaaatcggaaccctaaagggagcccccgatttagagcttgacggggaaagccggcgaacgtggcgagaaaggaagggaagaaagcgaaaggagcgggcgctagggcgctggcaagtgtagcggtcacgctgcgcgtaaccaccacacccgccgcgcttaatgcgccgctacagggcgcgtcgcgccattcgccattcaggctgcgcaactgttgggaagggcgatcggtgcgggcctcttcgctattacgccagctggcgaaagggggatgtgctgcaaggcgattaagttgggtaacgccagggttttcccagtcacgacgttgtaaaacgacggccagtgagcgcgcgtaatacgactcactatagggcgaattgggtaccgggccccccctcgaggtcgacggtatcgataagcttgatatcgaattcctgcagcccgggggatccgttagaatcattttgaataaaaaacacgctttttcagttcgagtttatcattatcaatactgccatttcaaagaatacgtaaataattaatagtagtgattttcctaactttatttagtcaaaaaattagccttttaattctgctgtaacccgtacatgcccaaaatagggggcgggttacacagaatatataacatcgtaggtgtctgggtgaacagtttattcctggcatccactaaatataatggagcccgctttttaagctggcatccagaaaaaaaaagaatcccagcaccaaaatattgttttcttcaccaaccatcagttcataggtccattctcttagcgcaactacagagaacaggggcacaaacaggcaaaaaacgggcacaacctcaatggagtgatgcaacctgcctggagtaaatgatgacacaaggcaattgacccacgcatgtatctatctcattttcttacaccttctattaccttctgctctctctgatttggaaaaagctgaaaaaaaaggttgaaaccagttccctgaaattattcccctacttgactaataagtatataaagacggtaggtattgattgtaattctgtaaatctatttcttaaacttcttaaattctacttttatagttagtcttttttttagttttaaaacaccaagaacttagtttcgaataaacacacataaacaaacaaagaattc

SEQ ID NO: 733 - DNA, 9753 bp, synthetic construct
  misc_feature 1..9753: note = Synthetic
  source 1..9753: mol_type = other DNA
atgaaacggacagccgacggaagcgagttcgagtcaccaaagaagaagcggaaagtcgacaagaagtacagcatcggcctggacatcggcaccaactctgtgggctgggccgtgatcaccgacgagtacaaggtgcccagcaagaaattcaaggtgctgggcaacaccgaccggcacagcatcaagaagaacctgatcggagccctgctgttcgacagcggcgaaacagccgaggccacccggctgaagagaaccgccagaagaagatacaccagacggaagaaccggatctgctatctgcaagagatcttcagcaacgagatggccaaggtggacgacagcttcttccacagactggaagagtccttcctggtggaagaggataagaagcacgagcggcaccccatcttcggcaacatcgtggacgaggtggcctaccacgagaagtaccccaccatctaccacctgagaaagaaactggtggacagcaccgacaaggccgacctgcggctgatctatctggccctggcccacatgatcaagttccggggccacttcctgatcgagggcgacctgaaccccgacaacagcgacgtggacaagctgttcatccagctggtgcagacctacaaccagctgttcgaggaaaaccccatcaacgccagcggcgtggacgccaaggccatcctgtctgccagactgagcaagagcagacggctggaaaatctgatcgcccagctgcccggcgagaagaagaatggcctgttcggaaacctgattgccctgagcctgggcctgacccccaacttcaagagcaacttcgacctggccgaggatgccaaactgcagctgagcaaggacacctacgacgacgacctggacaacctgctggcccagatcggcgaccagtacgccgacctgtttctggccgccaagaacctgtccgacgccatcctgctgagcgacatcctgagagtgaacaccgagatcaccaaggcccccctgagcgcctctatgatcaagagatacgacgagcaccaccaggacctgaccctgctgaaagctctcgtgcggcagcagctgcctgagaagtacaaagagattttcttcgaccagagcaagaacggctacgccggctacattgacggcggagccagccaggaagagttctacaagttcatcaagcccatcctggaaaagatggacggcaccgaggaactgctcgtgaagctgaacagagaggacctgctgcggaagcagcggaccttcgacaacggcagcatcccccaccagatccacctgggagagctgcacgccattctgcggcggcaggaagatttttacccattcctgaaggacaaccgggaaaagatcgagaagatcctgaccttccgcatcccctactacgtgggccctctggccaggggaaacagcagattcgcctggatgaccagaaagagcgaggaaaccatcaccccctggaacttcgaggaagtggtggacaagggcgcttccgcccagagcttcatcgagcggatgaccaacttcgataagaacctgcccaacgagaaggtgctgcccaagcacagcctgctgtacgagtacttcaccgtgtataacgagctgaccaaagtgaaatacgtgaccgagggaatgagaaagcccgccttcctgagcggcgagcagaaaaaggccatcgtggacctgctgttcaagaccaaccggaaagtgaccgtgaagcagctgaaagaggactacttcaagaaaatcgagtgcttcgactccgtggaaatctccggcgtggaagatcggttcaacgcctccctgggcacataccacgatctgctgaaaattatcaaggacaaggacttcctggacaatgaggaaaacgaggacattctggaagatatcgtgctgaccctgacactgtttgaggacagagagatgatcgaggaacggctgaaaacctatgcccacctgttcgacgacaaagtgatgaagcagctgaagcggcggagatacaccggctggggcaggctgagccggaagctgatcaacggcatccgggacaagcagtccggcaagacaatcctggatttcctgaagtccgacggcttcgccaacagaaacttcatgcagctgatccacgacgacagcctgacctttaaagaggacatccagaaagcccaggtgtccggccagggcgatagcctgcacgagcacattgccaatctggccggcagccccgccattaagaagggcatcctgcagacagtgaaggtggtggacgagctcgtgaaagtgatgggccggcacaagcccgagaacatcgtgatcgaaatggccagagagaaccagaccacccagaagggacagaagaacagccgcgagagaatgaagcggatcgaagagggcatcaaagagctgggcagccagatcctgaaagaacaccccgtggaaaacacccagctgcagaacgagaagctgtacctgtactacctgcagaatgggcgggatatgtacgtggaccaggaactggacatcaaccggctgtccgactacgatgtggacgctatcgtgcctcagagctttctgaaggacgactccatcgacaacaaggtgctgaccagaagcgacaagaaccggggcaagagcgacaacgtgccctccgaagaggtcgtgaagaagatgaagaactactggcggcagctgctgaacgccaagctgattacccagagaaagttcgacaatctgaccaaggccgagagaggcggcctgagcgaactggataaggccggcttcatcaagagacagctggtggaaacccggcagatcacaaagcacgtggcacagatcctggactcccggatgaacactaagtacgacgagaatgacaagctgatccgggaagtgaaagtgatcaccctgaagtccaagctggtgtccgatttccggaaggatttccagttttacaaagtgcgcgagatcaacaactaccaccacgcccacgacgcctacctgaacgccgtcgtgggaaccgccctgatcaaaaagtaccctaagctggaaagcgagttcgtgtacggcgactacaaggtgtacgacgtgcggaagatgatcgccaagagcgagcaggaaatcggcaaggctaccgccaagtacttcttctacagcaacatcatgaactttttcaagaccgagattaccctggccaacggcgagatccggaagcggcctctgatcgagacaaacggcgaaaccggggagatcgtgtgggataagggccgggattttgccaccgtgcggaaagtgctgagcatgccccaagtgaatatcgtgaaaaagaccgaggtgcagacaggcggcttcagcaaagagtctatcctgcccaagaggaacagcgataagctgatcgccagaaagaaggactgggaccctaagaagtacggcggcttcgacagccccaccgtggcctattctgtgctggtggtggccaaagtggaaaagggcaagtccaagaaactgaagagtgtgaaagagctgctggggatcaccatcatggaaagaagcagcttcgagaagaatcccatcgactttctggaagccaagggctacaaagaagtgaaaaaggacctgatcatcaagctgcctaagtactccctgttcgagctggaaaacggccggaagagaatgctggcctctgccggcgaactgcagaagggaaacgaactggccctgccctccaaatatgtgaacttcctgtacctggccagccactatgagaagctgaagggctcccccgaggataatgagcagaaacagctgtttgtggaacagcacaagcactacctggacgagatcatcgagcagatcagcgagttctccaagagagtgatcctggccgacgctaatctggacaaagtgctgtccgcctacaacaagcaccgggataagcccatcagagagcaggccgagaatatcatccacctgtttaccctgaccaatctgggagcccctgccgccttcaagtactttgacaccaccatcgaccggaagaggtacaccagcaccaaagaggtgctggacgccaccctgatccaccagagcatcaccggcctgtacgagacacggatcgacctgtctcagctgggaggtgactctggaggatctagcggaggatcctctggcagcgagacaccaggaacaagcgagtcagcaacaccagagagcagtggcggcagcagcggcggcagcagcaccctaaatatagaagatgagtatcggctacatgagacctcaaaagagccagatgtttctctagggtccacatggctgtctgattttcctcaggcctgggcggaaaccgggggcatgggactggcagttcgccaagctcctctgatcatacctctgaaagcaacctctacccccgtgtccataaaacaataccccatgtcacaagaagccagactggggatcaagccccacatacagagactgttggaccagggaatactggtaccctgccagtccccctggaacacgcccctgctacccgttaagaaaccagggactaatgattataggcctgtccaggatctgagagaagtcaacaagcgggtggaagacatccaccccaccgtgcccaacccttacaacctcttgagcgggctcccaccgtcccaccagtggtacactgtgcttgatttaaaggatgcctttttctgcctgagactccaccccaccagtcagcctctcttcgcctttgagtggagagatccagagatgggaatctcaggacaattgacctggaccagactcccacagggtttcaaaaacagtcccaccctgtttgatgaggcactgcacagagacctagcagacttccggatccagcacccagacttgatcctgctacagtacgtggatgacttactgctggccgccacttctgagctagactgccaacaaggtactcgggccctgttacaaaccctagggaacctcgggtatcgggcctcggccaagaaagcccaaatttgccagaaacaggtcaagtatctggggtatcttctaaaagagggtcagagatggctgactgaggccagaaaagagactgtgatggggcagcctactccgaagacccctcgacaactaagggagttcctagggacggcaggcttctgtcgcctctggatccctgggtttgcagaaatggcagcccccctgtaccctctcaccaaaacggggactctgtttaattggggcccagaccaacaaaaggcctatcaagaaatcaagcaagctcttctaactgccccagccctggggttgccagatttgactaagccctttgaactctttgtcgacgagaagcagggctacgccaaaggtgtcctaacgcaaaaactgggaccttggcgtcggccggtggcctacctgtccaaaaagctagacccagtagcagctgggtggcccccttgcctacggatggtagcagccattgccgtactgacaaaggatgcaggcaagctaaccatgggacagccactagtcattctggccccccatgcagtagaggcactagtcaaacaaccccccgaccgctggctttccaacgcccggatgactcactatcaggccttgcttttggacacggaccgggtccagttcggaccggtggtagccctgaacccggctacgctgctcccactgcctgaggaagggctgcaacacaactgccttgatatcctggccgaagcccacggaacccgacccgacctaacggaccagccgctcccagacgccgaccacacctggtacacggatggaagcagtctcttacaagagggacagcgtaaggcgggagctgcggtgaccaccgagaccgaggtaatctgggctaaagccctgccagccgggacatccgctcagcgggctgaactgatagcactcacccaggccctaaagatggcagaaggtaagaagctaaatgtttatactgatagccgttatgcttttgctactgcccatatccatggagaaatatacagaaggcgtgggttgctcacatcagaaggcaaagagatcaaaaataaagacgagatcttggccctactaaaagccctctttctgcccaaaagacttagcataatccattgtccaggacatcaaaagggacacagcgccgaggctagaggcaaccggatggctgaccaagcggcccgaaaggcagccatcacagagactccagacacctctaccctcctcatagaaaattcatcaccctctggcggctcaaaaagaaccgccgacggcagcgaattcgagcccaagaagaagaggaaagtctaaccggtcatcatcaccatcaccattgagtttaaacccgctgatcagcctcgactgtgccttctagttgccagccatctgttgtttgcccctcccccgtgccttccttgaccctggaaggtgccactcccactgtcctttcctaataaaatgagaaaattgcatcgcattgtctgagtaggtgtcattctattctggggggtggggtggggcaggacagcaagggggaggattgggaagacaatagcaggcatgctggggatgcggtgggctctatggcttctgaggcggaaagaaccagctggggctcgataccgtcgacctctagctagagcttggcgtaatcatggtcatagctgtttcctgtgtgaaattgttatccgctcacaattccacacaacatacgagccggaagcataaagtgtaaagcctagggtgcctaatgagtgagctaactcacattaattgcgttgcgctcactgcccgctttccagtcgggaaacctgtcgtgccagctgcattaatgaatcggccaacgcgcggggagaggcggtttgcgtattgggcgctcttccgcttcctcgctcactgactcgctgcgctcggtcgttcggctgcggcgagcggtatcagctcactcaaaggcggtaatacggttatccacagaatcaggggataacgcaggaaagaacatgtgagcaaaaggccagcaaaaggccaggaaccgtaaaaaggccgcgttgctggcgtttttccataggctccgcccccctgacgagcatcacaaaaatcgacgctcaagtcagaggtggcgaaacccgacaggactataaagataccaggcgtttccccctggaagctccctcgtgcgctctcctgttccgaccctgccgcttaccggatacctgtccgcctttctcccttcgggaagcgtggcgctttctcatagctcacgctgtaggtatctcagttcggtgtaggtcgttcgctccaagctgggctgtgtgcacgaaccccccgttcagcccgaccgctgcgccttatccggtaactatcgtcttgagtccaacccggtaagacacgacttatcgccactggcagcagccactggtaacaggattagcagagcgaggtatgtaggcggtgctacagagttcttgaagtggtggcctaactacggctacactagaagaacagtatttggtatctgcgctctgctgaagccagttaccttcggaaaaagagttggtagctcttgatccggcaaacaaaccaccgctggtagcggtggtttttttgtttgcaagcagcagattacgcgcagaaaaaaaggatctcaagaagatcctttgatcttttctacggggtctgacgctcagtggaacgaaaactcacgttaagggattttggtcatgagattatcaaaaaggatcttcacctagatccttttaaattaaaaatgaagttttaaatcaatctaaagtatatatgagtaaacttggtctgacagttaccaatgcttaatcagtgaggcacctatctcagcgatctgtctatttcgttcatccatagttgcctgactccccgtcgtgtagataactacgatacgggagggcttaccatctggccccagtgctgcaatgataccgcgagacccacgctcaccggctccagatttatcagcaataaaccagccagccggaagggccgagcgcagaagtggtcctgcaactttatccgcctccatccagtctattaattgttgccgggaagctagagtaagtagttcgccagttaatagtttgcgcaacgttgttgccattgctacaggcatcgtggtgtcacgctcgtcgtttggtatggcttcattcagctccggttcccaacgatcaaggcgagttacatgatcccccatgttgtgcaaaaaagcggttagctccttcggtcctccgatcgttgtcagaagtaagttggccgcagtgttatcactcatggttatggcagcactgcataattctcttactgtcatgccatccgtaagatgcttttctgtgactggtgagtactcaaccaagtcattctgagaatagtgtatgcggcgaccgagttgctcttgcccggcgtcaatacgggataataccgcgccacatagcagaactttaaaagtgctcatcattggaaaacgttcttcggggcgaaaactctcaaggatcttaccgctgttgagatccagttcgatgtaacccactcgtgcacccaactgatcttcagcatcttttactttcaccagcgtttctgggtgagcaaaaacaggaaggcaaaatgccgcaaaaaagggaataagggcgacacggaaatgttgaatactcatactcttcctttttcaatattattgaagcatttatcagggttattgtctcatgagcggatacatatttgaatgtatttagaaaaataaacaaataggggttccgcgcacatttccccgaaaagtgccacctgacgtcgacggatcgggagatcgatctcccgatcccctagggtcgactctcagtacaatctgctctgatgccgcatagttaagccagtatctgctccctgcttgtgtgttggaggtcgctgagtagtgcgcgagcaaaatttaagctacaacaaggcaaggcttgaccgacaattgcatgaagaatctgcttagggttaggcgttttgcgctgcttcgcgatgtacgggccagatatacgcgttgacattgattattgactagttattaatagtaatcaattacggggtcattagttcatagcccatatatggagttccgcgttacataacttacggtaaatggcccgcctggctgaccgcccaacgacccccgcccattgacgtcaataatgacgtatgttcccatagtaacgccaatagggactttccattgacgtcaatgggtggagtatttacggtaaactgcccacttggcagtacatcaagtgtatcatatgccaagtacgccccctattgacgtcaatgacggtaaatggcccgcctggcattatgcccagtacatgaccttatgggactttcctacttggcagtacatctacgtattagtcatcgctattaccatggtgatgcggttttggcagtacatcaatgggcgtggatagcggtttgactcacggggatttccaagtctccaccccattgacgtcaatgggagtttgttttggcaccaaaatcaacgggactttccaaaatgtcgtaacaactccgccccattgacgcaaatgggcggtaggcgtgtacggtgggaggtctatataagcagagctggtttagtgaaccgtcagatccgctagagatccgcggccgctaatacgactcactatagggagagccgccacc

SEQ ID NO: 734 - DNA, 9753 bp, synthetic construct
  misc_feature 1..9753: note = Synthetic
  source 1..9753: mol_type = other DNA
atgaaacggacagccgacggaagcgagttcgagtcaccaaagaagaagcggaaagtcgacaagaagtacagcatcggcctggacatcggcaccaactctgtgggctgggccgtgatcaccgacgagtacaaggtgcccagcaagaaattcaaggtgctgggcaacaccgaccggcacagcatcaagaagaacctgatcggagccctgctgttcgacagcggcgaaacagccgaggccacccggctgaagagaaccgccagaagaagatacaccagacggaagaaccggatctgctatctgcaagagatcttcagcaacgagatggccaaggtggacgacagcttcttccacagactggaagagtccttcctggtggaagaggataagaagcacgagcggcaccccatcttcggcaacatcgtggacgaggtggcctaccacgagaagtaccccaccatctaccacctgagaaagaaactggtggacagcaccgacaaggccgacctgcggctgatctatctggccctggcccacatgatcaagttccggggccacttcctgatcgagggcgacctgaaccccgacaacagcgacgtggacaagctgttcatccagctggtgcagacctacaaccagctgttcgaggaaaaccccatcaacgccagcggcgtggacgccaaggccatcctgtctgccagactgagcaagagcagacggctggaaaatctgatcgcccagctgcccggcgagaagaagaatggcctgttcggaaacctgattgccctgagcctgggcctgacccccaacttcaagagcaacttcgacctggccgaggatgccaaactgcagctgagcaaggacacctacgacgacgacctggacaacctgctggcccagatcggcgaccagtacgccgacctgtttctggccgccaagaacctgtccgacgccatcctgctgagcgacatcctgagagtgaacaccgagatcaccaaggcccccctgagcgcctctatgatcaagagatacgacgagcaccaccaggacctgaccctgctgaaagctctcgtgcggcagcagctgcctgagaagtacaaagagattttcttcgaccagagcaagaacggctacgccggctacattgacggcggagccagccaggaagagttctacaagttcatcaagcccatcctggaaaagatggacggcaccgaggaactgctcgtgaagctgaacagagaggacctgctgcggaagcagcggaccttcgacaacggcagcatcccccaccagatccacctgggagagctgcacgccattctgcggcggcaggaagatttttacccattcctgaaggacaaccgggaaaagatcgagaagatcctgaccttccgcatcccctactacgtgggccctctggccaggggaaacagcagattcgcctggatgaccagaaagagcgaggaaaccatcaccccctggaacttcgaggaagtggtggacaagggcgcttccgcccagagcttcatcgagcggatgaccaacttcgataagaacctgcccaacgagaaggtgctgcccaagcacagcctgctgtacgagtacttcaccgtgtataacgagctgaccaaagtgaaatacgtgaccgagggaatgagaaagcccgccttcctgagcggcgagcagaaaaaggccatcgtggacctgctgttcaagaccaaccggaaagtgaccgtgaagcagctgaaagaggactacttcaagaaaatcgagtgcttcgactccgtggaaatctccggcgtggaagatcggttcaacgcctccctgggcacataccacgatctgctgaaaattatcaaggacaaggacttcctggacaatgaggaaaacgaggacattctggaagatatcgtgctgaccctgacactgtttgaggacagagagatgatcgaggaacggctgaaaacctatgcccacctgttcgacgacaaagtgatgaagcagctgaagcggcggagatacaccggctggggcaggctgagccggaagctgatcaacggcatccgggacaagcagtccggcaagacaatcctggatttcctgaagtccgacggcttcgccaacagaaacttcatgcagctgatccacgacgacagcctgacctttaaagaggacatccagaaagcccaggtgtccggccagggcgatagcctgcacgagcacattgccaatctggccggcagccccgccattaagaagggcatcctgcagacagtgaaggtggtggacgagctcgtgaaagtgatgggccggcacaagcccgagaacatcgtgatcgaaatggccagagagaaccagaccacccagaagggacagaagaacagccgcgagagaatgaagcggatcgaagagggcatcaaagagctgggcagccagatcctgaaagaacaccccgtggaaaacacccagctgcagaacgagaagctgtacctgtactacctgcagaatgggcgggatatgtacgtggaccaggaactggacatcaaccggctgtccgactacgatgtggacgctatcgtgcctcagagctttctgaaggacgactccatcgacaacaaggtgctgaccagaagcgacaagaaccggggcaagagcgacaacgtgccctccgaagaggtcgtgaagaagatgaagaactactggcggcagctgctgaacgccaagctgattacccagagaaagttcgacaatctgaccaaggccgagagaggcggcctgagcgaactggataaggccggcttcatcaagagacagctggtggaaacccggcagatcacaaagcacgtggcacagatcctggactcccggatgaacactaagtacgacgagaatgacaagctgatccgggaagtgaaagtgatcaccctgaagtccaagctggtgtccgatttccggaaggatttccagttttacaaagtgcgcgagatcaacaactaccaccacgcccacgacgcctacctgaacgccgtcgtgggaaccgccctgatcaaaaagtaccctaagctggaaagcgagttcgtgtacggcgactacaaggtgtacgacgtgcggaagatgatcgccaagagcgagcaggaaatcggcaaggctaccgccaagtacttcttctacagcaacatcatgaactttttcaagaccgagattaccctggccaacggcgagatccggaagcggcctctgatcgagacaaacggcgaaaccggggagatcgtgtgggataagggccgggattttgccaccgtgcggaaagtgctgagcatgccccaagtgaatatcgtgaaaaagaccgaggtgcagacaggcggcttcagcaaagagtctatcctgcccaagaggaacagcgataagctgatcgccagaaagaaggactgggaccctaagaagtacggcggcttcgacagccccaccgtggcctattctgtgctggtggtggccaaagtggaaaagggcaagtccaagaaactgaagagtgtgaaagagctgctggggatcaccatcatggaaagaagcagcttcgagaagaatcccatcgactttctggaagccaagggctacaaagaagtgaaaaaggacctgatcatcaagctgcctaagtactccctgttcgagctggaaaacggccggaagagaatgctggcctctgccggcgaactgcagaagggaaacgaactggccctgccctccaaatatgtgaacttcctgtacctggccagccactatgagaagctgaagggctcccccgaggataatgagcagaaacagctgtttgtggaacagcacaagcactacctggacgagatcatcgagcagatcagcgagttctccaagagagtgatcctggccgacgctaatctggacaaagtgctgtccgcctacaacaagcaccgggataagcccatcagagagcaggccgagaatatcatccacctgtttaccctgaccaatctgggagcccctgccgccttcaagtactttgacaccaccatcgaccggaagaggtacaccagcaccaaagaggtgctggacgccaccctgatccaccagagcatcaccggcctgtacgagacacggatcgacctgtctcagctgggaggtgactctggaggatctagcggaggatcctctggcagcgagacaccaggaacaagcgagtcagcaacaccagagagcagtggcggcagcagcggcggcagcagcaccctaaatatagaagatgagtatcggctacatgagacctcaaaagagccagatgtttctctagggtccacatggctgtctgattttcctcaggcctgggcggaaaccgggggcatgggactggcagttcgccaagctcctctgatcatacctctgaaagcaacctctacccccgtgtccataaaacaataccccatgtcacaagaagccagactggggatcaagccccacatacagagactgttggaccagggaatactggtaccctgccagtccccctggaacacgcccctgctacccgttaagaaaccagggactaatgattataggcctgtccaggatctgagagaagtcaacaagcgggtggaagacatccaccccaccgtgcccaacccttacaacctcttgagcgggctcccaccgtcccaccagtggtacactgtgcttgatttaaaggatgcctttttctgcctgagactccaccccaccagtcagcctctcttcgcctttgagtggagagatccagagatgggaatctcaggacaattgacctggaccagactcccacagggtttcaaaaacagtcccaccctgtttaatgaggcactgcacagagacctagcagacttccggatccagcacccagacttgatcctgctacagtacgtggatgacttactgctggccgccacttctgagctagactgccaacaaggtactcgggccctgttacaaaccctagggaacctcgggtatcgggcctcggccaagaaagcccaaatttgccagaaacaggtcaagtatctggggtatcttctaaaagagggtcagagatggctgactgaggccagaaaagagactgtgatggggcagcctactccgaagacccctcgacaactaagggagttcctagggaaggcaggcttctgtcgcctcttcatccctgggtttgcagaaatggcagcccccctgtaccctctcaccaaaccggggactctgtttaattggggcccagaccaacaaaaggcctatcaagaaatcaagcaagctcttctaactgccccagccctggggttgccagatttgactaagccctttgaactctttgtcgacgagaagcagggctacgccaaaggtgtcctaacgcaaaaactgggaccttggcgtcggccggtggcctacctgtccaaaaagctagacccagtagcagctgggtggcccccttgcctacggatggtagcagccattgccgtactgacaaaggatgcaggcaagctaaccatgggacagccactagtcattctggccccccatgcagtagaggcactagtcaaacaaccccccgaccgctggctttccaacgcccggatgactcactatcaggccttgcttttggacacggaccgggtccagttcggaccggtggtagccctgaacccggctacgctgctcccactgcctgaggaagggctgcaacacaactgccttgatatcctggccgaagcccacggaacccgacccgacctaacggaccagccgctcccagacgccgaccacacctggtacacggatggaagcagtctcttacaagagggacagcgtaaggcgggagctgcggtgaccaccgagaccgaggtaatctgggctaaagccctgccagccgggacatccgctcagcgggctgaactgatagcactcacccaggccctaaagatggcagaaggtaagaagctaaatgtttatactgatagccgttatgcttttgctactgcccatatccatggagaaatatacagaaggcgtgggtggctcacatcagaaggcaaagagatcaaaaataaagacgagatcttggccctactaaaagccctctttctgcccaaaagacttagcataatccattgtccaggacatcaaaagggacacagcgccgaggctagaggcaaccggatggctgaccaagcggcccgaaaggcagccatcacagagactccagacacctctaccctcctcatagaaaattcatcaccctctggcggctcaaaaagaaccgccgacggcagcgaattcgagcccaagaagaagaggaaagtctaaccggtcatcatcaccatcaccattgagtttaaacccgctgatcagcctcgactgtgccttctagttgccagccatctgttgtttgcccctcccccgtgccttccttgaccctggaaggtgccactcccactgtcctttcctaataaaatgagaaaattgcatcgcattgtctgagtaggtgtcattctattctggggggtggggtggggcaggacagcaagggggaggattgggaagacaatagcaggcatgctggggatgcggtgggctctatggcttctgaggcggaaagaaccagctggggctcgataccgtcgacctctagctagagcttggcgtaatcatggtcatagctgtttcctgtgtgaaattgttatccgctcacaattccacacaacatacgagccggaagcataaagtgtaaagcctagggtgcctaatgagtgagctaactcacattaattgcgttgcgctcactgcccgctttccagtcgggaaacctgtcgtgccagctgcattaatgaatcggccaacgcgcggggagaggcggtttgcgtattgggcgctcttccgcttcctcgctcactgactcgctgcgctcggtcgttcggctgcggcgagcggtatcagctcactcaaaggcggtaatacggttatccacagaatcaggggataacgcaggaaagaacatgtgagcaaaaggccagcaaaaggccaggaaccgtaaaaaggccgcgttgctggcgtttttccataggctccgcccccctgacgagcatcacaaaaatcgacgctcaagtcagaggtggcgaaacccgacaggactataaagataccaggcgtttccccctggaagctccctcgtgcgctctcctgttccgaccctgccgcttaccggatacctgtccgcctttctcccttcgggaagcgtggcgctttctcatagctcacgctgtaggtatctcagttcggtgtaggtcgttcgctccaagctgggctgtgtgcacgaaccccccgttcagcccgaccgctgcgccttatccggtaactatcgtcttgagtccaacccggtaagacacgacttatcgccactggcagcagccactggtaacaggattagcagagcgaggtatgtaggcggtgctacagagttcttgaagtggtggcctaactacggctacactagaagaacagtatttggtatctgcgctctgctgaagccagttaccttcggaaaaagagttggtagctcttgatccggcaaacaaaccaccgctggtagcggtggtttttttgtttgcaagcagcagattacgcgcagaaaaaaaggatctcaagaagatcctttgatcttttctacggggtctgacgctcagtggaacgaaaactcacgttaagggattttggtcatgagattatcaaaaaggatcttcacctagatccttttaaattaaaaatgaagttttaaatcaatctaaagtatatatgagtaaacttggtctgacagttaccaatgcttaatcagtgaggcacctatctcagcgatctgtctatttcgttcatccatagttgcctgactccccgtcgtgtagataactacgatacgggagggcttaccatctggccccagtgctgcaatgataccgcgagacccacgctcaccggctccagatttatcagcaataaaccagccagccggaagggccgagcgcagaagtggtcctgcaactttatccgcctccatccagtctattaattgttgccgggaagctagagtaagtagttcgccagttaatagtttgcgcaacgttgttgccattgctacaggcatcgtggtgtcacgctcgtcgtttggtatggcttcattcagctccggttcccaacgatcaaggcgagttacatgatcccccatgttgtgcaaaaaagcggttagctccttcggtcctccgatcgttgtcagaagtaagttggccgcagtgttatcactcatggttatggcagcactgcataattctcttactgtcatgccatccgtaagatgcttttctgtgactggtgagtactcaaccaagtcattctgagaatagtgtatgcggcgaccgagttgctcttgcccggcgtcaatacgggataataccgcgccacatagcagaactttaaaagtgctcatcattggaaaacgttcttcggggcgaaaactctcaaggatcttaccgctgttgagatccagttcgatgtaacccactcgtgcacccaactgatcttcagcatcttttactttcaccagcgtttctgggtgagcaaaaacaggaaggcaaaatgccgcaaaaaagggaataagggcgacacggaaatgttgaatactcatactcttcctttttcaatattattgaagcatttatcagggttattgtctcatgagcggatacatatttgaatgtatttagaaaaataaacaaataggggttccgcgcacatttccccgaaaagtgccacctgacgtcgacggatcgggagatcgatctcccgatcccctagggtcgactctcagtacaatctgctctgatgccgcatagttaagccagtatctgctccctgcttgtgtgttggaggtcgctgagtagtgcgcgagcaaaatttaagctacaacaaggcaaggcttgaccgacaattgcatgaagaatctgcttagggttaggcgttttgcgctgcttcgcgatgtacgggccagatatacgcgttgacattgattattgactagttattaatagtaatcaattacggggtcattagttcatagcccatatatggagttccgcgttacataacttacggtaaatggcccgcctggctgaccgcccaacgacccccgcccattgacgtcaataatgacgtatgttcccatagtaacgccaatagggactttccattgacgtcaatgggtggagtatttacggtaaactgcccacttggcagtacatcaagtgtatcatatgccaagtacgccccctattgacgtcaatgacggtaaatggcccgcctggcattatgcccagtacatgaccttatgggactttcctacttggcagtacatctacgtattagtcatcgctattaccatggtgatgcggttttggcagtacatcaatgggcgtggatagcggtttgactcacggggatttccaagtctccaccccattgacgtcaatgggagtttgttttggcaccaaaatcaacgggactttccaaaatgtcgtaacaactccgccccattgacgcaaatgggcggtaggcgtgtacggtgggaggtctatataagcagagctggtttagtgaaccgtcagatccgctagagatccgcggccgctaatacgactcactatagggagagccgccacc

SEQ ID NO: 735 - DNA, 2305 bp, synthetic construct
  misc_feature 1..2305: note = Synthetic
  source 1..2305: mol_type = other DNA
gagggcctatttcccatgattccttcatatttgcatatacgatacaaggctgttagagagataattagaattaatttgactgtaaacacaaagatattagtacaaaatacgtgacgtagaaagtaataatttcttgggtagtttgcagttttaaaattatgttttaaaatggactatcatatgcttaccgtaacttgaaagtatttcgatttcttggctttatatatcttgtggaaaggacgaaacaccggcccagactgagcacgtgagttttagagctagaaatagcaagttaaaataaggctagtccgttatcaacttgaaaaagtgggaccgagtcggtcctctgccatcaaagcgtgctcagtctgtttttttaagcttgggccgctcgaggtacctctctacatatgacatgtgagcaaaaggccagcaaaaggccaggaaccgtaaaaaggccgcgttgctggcgtttttccataggctccgcccccctgacgagcatcacaaaaatcgacgctcaagtcagaggtggcgaaacccgacaggactataaagataccaggcgtttccccctggaagctccctcgtgcgctctcctgttccgaccctgccgcttaccggatacctgtccgcctttctcccttcgggaagcgtggcgctttctcatagctcacgctgtaggtatctcagttcggtgtaggtcgttcgctccaagctgggctgtgtgcacgaaccccccgttcagcccgaccgctgcgccttatccggtaactatcgtcttgagtccaacccggtaagacacgacttatcgccactggcagcagccactggtaacaggattagcagagcgaggtatgtaggcggtgctacagagttcttgaagtggtggcctaactacggctacactagaagaacagtatttggtatctgcgctctgctgaagccagttaccttcggaaaaagagttggtagctcttgatccggcaaacaaaccaccgctggtagcggtggtttttttgtttgcaagcagcagattacgcgcagaaaaaaaggatctcaagaagatcctttgatcttttctacggggtctgacgctcagtggaacgaaaactcacgttaagggattttggtcatgagattatcaaaaaggatcttcacctagatccttttaaattaaaaatgaagttttaaatcaatctaaagtatatatgagtaaacttggtctgacagttaccaatgcttaatcagtgaggcacctatctcagcgatctgtctatttcgttcatccatagttgcctgactccccgtcgtgtagataactacgatacgggagggcttaccatctggccccagtgctgcaatgataccgcgagacccacgctcaccggctccagatttatcagcaataaaccagccagccggaagggccgagcgcagaagtggtcctgcaactttatccgcctccatccagtctattaattgttgccgggaagctagagtaagtagttcgccagttaatagtttgcgcaacgttgttgccattgctacaggcatcgtggtgtcacgctcgtcgtttggtatggcttcattcagctccggttcccaacgatcaaggcgagttacatgatcccccatgttgtgcaaaaaagcggttagctccttcggtcctccgatcgttgtcagaagtaagttggccgcagtgttatcactcatggttatggcagcactgcataattctcttactgtcatgccatccgtaagatgcttttctgtgactggtgagtactcaaccaagtcattctgagaatagtgtatgcggcgaccgagttgctcttgcccggcgtcaatacgggataataccgcgccacatagcagaactttaaaagtgctcatcattggaaaacgttcttcggggcgaaaactctcaaggatcttaccgctgttgagatccagttcgatgtaacccactcgtgcacccaactgatcttcagcatcttttactttcaccagcgtttctgggtgagcaaaaacaggaaggcaaaatgccgcaaaaaagggaataagggcgacacggaaatgttgaatactcatactcttcctttttcaatattattgaagcatttatcagggttattgtctcatgagcggatacatatttgaatgtatttagaaaaataaacaaataggggttccgcgcacatttccccgaaaagtgccacctgacgtcgctagctgtacaaaaaagcaggctttaaaggaaccaattcagtcgactggatccggtaccaaggtcgggcaggaa

SEQ ID NO: 736 - DNA, 11591 bp, synthetic construct
  misc_feature 1..11591: note = Synthetic
  source 1..11591: mol_type = other DNA
gtcgacggatcgggagatctcccgatcccctatggtgcactctcagtacaatctgctctgatgccgcatagttaagccagtatctgctccctgcttgtgtgttggaggtcgctgagtagtgcgcgagcaaaatttaagctacaacaaggcaaggcttgaccgacaattgcatgaagaatctgcttagggttaggcgttttgcgctgcttcgcgatgtacgggccagatatacgcgttgacattgattattgactagttattaatagtaatcaattacggggtcattagttcatagcccatatatggagttccgcgttacataacttacggtaaatggcccgcctggctgaccgcccaacgacccccgcccattgacgtcaataatgacgtatgttcccatagtaacgccaatagggactttccattgacgtcaatgggtggagtatttacggtaaactgcccacttggcagtacatcaagtgtatcatatgccaagtacgccccctattgacgtcaatgacggtaaatggcccgcctggcattatgcccagtacatgaccttatgggactttcctacttggcagtacatctacgtattagtcatcgctattaccatggtgatgcggttttggcagtacatcaatgggcgtggatagcggtttgactcacggggatttccaagtctccaccccattgacgtcaatgggagtttgttttggcaccaaaatcaacgggactttccaaaatgtcgtaacaactccgccccattgacgcaaatgggcggtaggcgtgtacggtgggaggtctatataagcagcgcgttttgcctgtactgggtctctctggttagaccagatctgagcctgggagctctctggctaactagggaacccactgcttaagcctcaataaagcttgccttgagtgcttcaagtagtgtgtgcccgtctgttgtgtgactctggtaactagagatccctcagacccttttagtcagtgtggaaaatctctagcagtggcgcccgaacagggacttgaaagcgaaagggaaaccagaggagctctctcgacgcaggactcggcttgctgaagcgcgcacggcaagaggcgaggggcggcgactggtgagtacgccaaaaattttgactagcggaggctagaaggagagagatgggtgcgagagcgtcagtattaagcgggggagaattagatcgcgatgggaaaaaattcggttaaggccagggggaaagaaaaaatataaattaaaacatatagtatgggcaagcagggagctagaacgattcgcagttaatcctggcctgttagaaacatcagaaggctgtagacaaatactgggacagctacaaccatcccttcagacaggatcagaagaacttagatcattatataatacagtagcaaccctctattgtgtgcatcaaaggatagagataaaagacaccaaggaagctttagacaagatagaggaagagcaaaacaaaagtaagaccaccgcacagcaagcggccgctgatcttcagacctggaggaggagatatgagggacaattggagaagtgaattatataaatataaagtagtaaaaattgaaccattaggagtagcacccaccaaggcaaagagaagagtggtgcagagagaaaaaagagcagtgggaataggagctttgttccttgggttcttgggagcagcaggaagcactatgggcgcagcgtcaatgacgctgacggtacaggccagacaattattgtctggtatagtgcagcagcagaacaatttgctgagggctattgaggcgcaacagcatctgttgcaactcacagtctggggcatcaagcagctccaggcaagaatcctggctgtggaaagatacctaaaggatcaacagctcctggggatttggggttgctctggaaaactcatttgcaccactgctgtgccttggaatgctagttggagtaataaatctctggaacagatttggaatcacacgacctggatggagtgggacagagaaattaacaattacacaagcttaatacactccttaattgaagaatcgcaaaaccagcaagaaaagaatgaacaagaattattggaattagataaatgggcaagtttgtggaattggtttaacataacaaattggctgtggtatataaaattattcataatgatagtaggaggcttggtaggtttaagaatagtttttgctgtactttctatagtgaatagagttaggcagggatattcaccattatcgtttcagacccacctcccaaccccgaggggacccgacaggcccgaaggaatagaagaagaaggtggagagagagacagagacagatccattcgattagtgaacggatcggcactgcgtgcgccaattctgcagacaaatggcagtattcatccacaattttaaaagaaaaggggggattggggggtacagtgcaggggaaagaatagtagacataatagcaacagacatacaaactaaagaattacaaaaacaaattacaaaaattcaaaattttcgggtttattacagggacagcagagatccagtttggttaattaaggtaccaaggtcgggcaggaagagggcctatttcccatgattccttcatatttgcatatacgatacaaggctgttagagagataattagaattaatttgactgtaaacacaaagatattagtacaaaatacgtgacgtagaaagtaataatttcttgggtagtttgcagttttaaaattatgttttaaaatggactatcatatgcttaccgtaacttgaaagtatttcgatttcttggctttatatatcttgtggaaaggacgaaacaccgcgggctggagctgttcgcgcgttttagagctagaaatagcaagttaaaataaggctagtccgttatcaacttgaaaaagtggcaccgagtcggtgcaagatgcaagcgcgaacagctccagtttttttgaattcagtgcaagtgggttttaggaccaggatgaggcggggtgggggtgcctacctgacgaccgaccccgacccactggacaagcacccaacccccattccccaaattgcgcatcccctatcagagagggggaggggaaacaggatgcggcgaggcgcgtgcgcactgccagcttcagcaccgcggacagtgccttcgcccccgcctggcggcgcgcgccaccgccgcctcagcactgaaggcgcgctgacgtcactcgccggtcccccgcaaactccccttcccggccaccttggtcgcgtccgcgccgccgccggcccagccggaccgcaccacgcgaggcgcgagataggggggcacgggcgcgaccatctgcgctgcggcgccggcgactcagcgctgcctcagtctgcggtgggcagcggaggagtcgtgtcgtgcctgagagcgcagtcgagaatctagagcgctgccaccatgaaacggacagccgacggaagcgagttcgagtcaccaaagaagaagcggaaagtcgacaagaagtacagcatcggcctggacatcggcaccaactctgtgggctgggccgtgatcaccgacgagtacaaggtgcccagcaagaaattcaaggtgctgggcaacaccgaccggcacagcatcaagaagaacctgatcggagccctgctgttcgacagcggcgaaacagccgaggccacccggctgaagagaaccgccagaagaagatacaccagacggaagaaccggatctgctatctgcaagagatcttcagcaacgagatggccaaggtggacgacagcttcttccacagactggaagagtccttcctggtggaagaggataagaagcacgagcggcaccccatcttcggcaacatcgtggacgaggtggcctaccacgagaagtaccccaccatctaccacctgagaaagaaactggtggacagcaccgacaaggccgacctgcggctgatctatctggccctggcccacatgatcaagttccggggccacttcctgatcgagggcgacctgaaccccgacaacagcgacgtggacaagctgttcatccagctggtgcagacctacaaccagctgttcgaggaaaaccccatcaacgccagcggcgtggacgccaaggccatcctgtctgccagactgagcaagagcagacggctggaaaatctgatcgcccagctgcccggcgagaagaagaatggcctgttcggaaacctgattgccctgagcctgggcctgacccccaacttcaagagcaacttcgacctggccgaggatgccaaactgcagctgagcaaggacacctacgacgacgacctggacaacctgctggcccagatcggcgaccagtacgccgacctgtttctggccgccaagaacctgtccgacgccatcctgctgagcgacatcctgagagtgaacaccgagatcaccaaggcccccctgagcgcctctatgatcaagagatacgacgagcaccaccaggacctgaccctgctgaaagctctcgtgcggcagcagctgcctgagaagtacaaagagattttcttcgaccagagcaagaacggctacgccggctacattgacggcggagccagccaggaagagttctacaagttcatcaagcccatcctggaaaagatggacggcaccgaggaactgctcgtgaagctgaacagagaggacctgctgcggaagcagcggaccttcgacaacggcagcatcccccaccagatccacctgggagagctgcacgccattctgcggcggcaggaagatttttacccattcctgaaggacaaccgggaaaagatcgagaagatcctgaccttccgcatcccctactacgtgggccctctggccaggggaaacagcagattcgcctggatgaccagaaagagcgaggaaaccatcaccccctggaacttcgaggaagtggtggacaagggcgcttccgcccagagcttcatcgagcggatgaccaacttcgataagaacctgcccaacgagaaggtgctgcccaagcacagcctgctgtacgagtacttcaccgtgtataacgagctgaccaaagtgaaatacgtgaccgagggaatgagaaagcccgccttcctgagcggcgagcagaaaaaggccatcgtggacctgctgttcaagaccaaccggaaagtgaccgtgaagcagctgaaagaggactacttcaagaaaatcgagtgcctgtcctacgagacagagatcctgacagtggagtatggcctgctgccaatcggcaagatcgtggagaagaggatcgagtgtaccgtgtactctgtggataacaatggcaacatctatacacagcccgtggcacagtggcacgataggggagagcaggaggtgttcgagtattgcctggaggacggcagcctgatcagggcaaccaaggaccacaagttcatgacagtggatggccagatgctgcccatcgacgagattttcgagcgggagctggacctgatgagagtggataacctgcctaatagcggaggcagtaaaagaacagcagacgggagtgagtttgagcccaagaaaaagagaaaggtgggatccggcgcaacaaacttctctctgctgaaacaagccggagatgtcgaagagaatcctggaccggtgagcaagggcgaggagctgttcaccggggtggtgcccatcctggtcgagctggacggcgacgtaaacggccacaagttcagcgtgtccggcgagggcgagggcgatgccacctacggcaagctgaccctgaagttcatctgcaccaccggcaagctgcccgtgccctggcccaccctcgtgaccaccctgacctacggcgtgcagtgcttcagccgctaccccgaccacatgaagcagcacgacttcttcaagtccgccatgcccgaaggctacgtccaggagcgcaccatcttcttcaaggacgacggcaactacaagacccgcgccgaggtgaagttcgagggcgacaccctggtgaaccgcatcgagctgaagggcatcgacttcaaggaggacggcaacatcctggggcacaagctggagtacaactacaacagccacaacgtctatatcatggccgacaagcagaagaacggcatcaaggtgaacttcaagatccgccacaacatcgaggacggcagcgtgcagctcgccgaccactaccagcagaacacccccatcggcgacggccccgtgctgctgcccgacaaccactacctgagcacccagtccgccctgagcaaagaccccaacgagaagcgcgatcacatggtcctgctggagttcgtgaccgccgccgggatcactctcggcatggacgagctgtacaagtccggactcagatctcgagaggaggaggaggagacagacagcaggatgccccacctcgacagccccggcagctcccagccgagacgctccttcctctcaagggtgatcagggcagcgctaccgttgcagctgcttctgctgctgctgctgctcctggcctgcctgctacctgcctctgaagatgactacagctgcacccaggccaacaactttgcccgatccttctaccccatgctgcggtacaccaacgggccacctcccacctaaacgcgttaagtcgacaatcaacctctggattacaaaatttgtgaaagattgactggtattcttaactatgttgctccttttacgctatgtggatacgctgctttaatgcctttgtatcatgctattgcttcccgtatggctttcattttctcctccttgtataaatcctggttgctgtctctttatgaggagttgtggcccgttgtcaggcaacgtggcgtggtgtgcactgtgtttgctgacgcaacccccactggttggggcattgccaccacctgtcagctcctttccgggactttcgctttccccctccctattgccacggcggaactcatcgccgcctgccttgcccgctgctggacaggggctcggctgttgggcactgacaattccgtggtgttgtcggggaaatcatcgtcctttccttggctgctcgcctgtgttgccacctggattctgcgcgggacgtccttctgctacgtcccttcggccctcaatccagcggaccttccttcccgcggcctgctgccggctctgcggcctcttccgcgtcttcgccttcgccctcagacgagtcggatctccctttgggccgcctccccgcgtcgactttaagaccaatgacttacaaggcagctgtagatcttagccactttttaaaagaaaaggggggactggaagggctaattcactcccaacgaagacaagatctgctttttgcttgtactgggtctctctggttagaccagatctgagcctgggagctctctggctaactagggaacccactgcttaagcctcaataaagcttgccttgagtgcttcaagtagtgtgtgcccgtctgttgtgtgactctggtaactagagatccctcagacccttttagtcagtgtggaaaatctctagcagggcccgtttaaacccgctgatcagcctcgactgtgccttctagttgccagccatctgttgtttgcccctcccccgtgccttccttgaccctggaaggtgccactcccactgtcctttcctaataaaatgaggaaattgcatcgcattgtctgagtaggtgtcattctattctggggggtggggtggggcaggacagcaagggggaggattgggaagacaatagcaggcatgctggggatgcggtgggctctatggcttctgaggcggaaagaaccagctggggctctagggggtatccccacgcgccctgtagcggcgcattaagcgcggcgggtgtggtggttacgcgcagcgtgaccgctacacttgccagcgccctagcgcccgctcctttcgctttcttcccttcctttctcgccacgttcgccggctttccccgtcaagctctaaatcgggggctccctttagggttccgatttagtgctttacggcacctcgaccccaaaaaacttgattagggtgatggttcacgtagtgggccatcgccctgatagacggtttttcgccctttgacgttggagtccacgttctttaatagtggactcttgttccaaactggaacaacactcaaccctatctcggtctattcttttgatttataagggattttgccgatttcggcctattggttaaaaaatgagctgatttaacaaaaatttaacgcgaattaattctgtggaatgtgtgtcagttagggtgtggaaagtccccaggctccccagcaggcagaagtatgcaaagcatgcatctcaattagtcagcaaccaggtgtggaaagtccccaggctccccagcaggcagaagtatgcaaagcatgcatctcaattagtcagcaaccatagtcccgcccctaactccgcccatcccgcccctaactccgcccagttccgcccattctccgccccatggctgactaattttttttatttatgcagaggccgaggccgcctctgcctctgagctattccagaagtagtgaggaggcttttttggaggcctaggcttttgcaaaaagctcccgggagcttgtatatccattttcggatctgatcagcacgtgttgacaattaatcatcggcatagtatatcggcatagtataatacgacaaggtgaggaactaaaccatggccaagttgaccagtgccgttccggtgctcaccgcgcgcgacgtcgccggagcggtcgagttctggaccgaccggctcgggttctcccgggacttcgtggaggacgacttcgccggtgtggtccgggacgacgtgaccctgttcatcagcgcggtccaggaccaggtggtgccggacaacaccctggcctgggtgtgggtgcgcggcctggacgagctgtacgccgagtggtcggaggtcgtgtccacgaacttccgggacgcctccgggccggccatgaccgagatcggcgagcagccgtgggggcgggagttcgccctgcgcgacccggccggcaactgcgtgcacttcgtggccgaggagcaggactgacacgtgctacgagatttcgattccaccgccgccttctatgaaaggttgggcttcggaatcgttttccgggacgccggctggatgatcctccagcgcggggatctcatgctggagttcttcgcccaccccaacttgtttattgcagcttataatggttacaaataaagcaatagcatcacaaatttcacaaataaagcatttttttcactgcattctagttgtggtttgtccaaactcatcaatgtatcttatcatgtctgtataccgtcgacctctagctagagcttggcgtaatcatggtcatagctgtttcctgtgtgaaattgttatccgctcacaattccacacaacatacgagccggaagcataaagtgtaaagcctggggtgcctaatgagtgagctaactcacattaattgcgttgcgctcactgcccgctttccagtcgggaaacctgtcgtgccagctgcattaatgaatcggccaacgcgcggggagaggcggtttgcgtattgggcgctcttccgcttcctcgctcactgactcgctgcgctcggtcgttcggctgcggcgagcggtatcagctcactcaaaggcggtaatacggttatccacagaatcaggggataacgcaggaaagaacatgtgagcaaaaggccagcaaaaggccaggaaccgtaaaaaggccgcgttgctggcgtttttccataggctccgcccccctgacgagcatcacaaaaatcgacgctcaagtcagaggtggcgaaacccgacaggactataaagataccaggcgtttccccctggaagctccctcgtgcgctctcctgttccgaccctgccgcttaccggatacctgtccgcctttctcccttcgggaagcgtggcgctttctcatagctcacgctgtaggtatctcagttcggtgtaggtcgttcgctccaagctgggctgtgtgcacgaaccccccgttcagcccgaccgctgcgccttatccggtaactatcgtcttgagtccaacccggtaagacacgacttatcgccactggcagcagccactggtaacaggattagcagagcgaggtatgtaggcggtgctacagagttcttgaagtggtggcctaactacggctacactagaagaacagtatttggtatctgcgctctgctgaagccagttaccttcggaaaaagagttggtagctcttgatccggcaaacaaaccaccgctggtagcggtggtttttttgtttgcaagcagcagattacgcgcagaaaaaaaggatctcaagaagatcctttgatcttttctacggggtctgacgctcagtggaacgaaaactcacgttaagggattttggtcatgagattatcaaaaaggatcttcacctagatccttttaaattaaaaatgaagttttaaatcaatctaaagtatatatgagtaaacttggtctgacagttaccaatgcttaatcagtgaggcacctatctcagcgatctgtctatttcgttcatccatagttgcctgactccccgtcgtgtagataactacgatacgggagggcttaccatctggccccagtgctgcaatgataccgcgagacccacgctcaccggctccagatttatcagcaataaaccagccagccggaagggccgagcgcagaagtggtcctgcaactttatccgcctccatccagtctattaattgttgccgggaagctagagtaagtagttcgccagttaatagtttgcgcaacgttgttgccattgctacaggcatcgtggtgtcacgctcgtcgtttggtatggcttcattcagctccggttcccaacgatcaaggcgagttacatgatcccccatgttgtgcaaaaaagcggttagctccttcggtcctccgatcgttgtcagaagtaagttggccgcagtgttatcactcatggttatggcagcactgcataattctcttactgtcatgccatccgtaagatgcttttctgtgactggtgagtactcaaccaagtcattctgagaatagtgtatgcggcgaccgagttgctcttgcccggcgtcaatacgggataataccgcgccacatagcagaactttaaaagtgctcatcattggaaaacgttcttcggggcgaaaactctcaaggatcttaccgctgttgagatccagttcgatgtaacccactcgtgcacccaactgatcttcagcatcttttactttcaccagcgtttctgggtgagcaaaaacaggaaggcaaaatgccgcaaaaaagggaataagggcgacacggaaatgttgaatactcatactcttcctttttcaatattattgaagcatttatcagggttattgtctcatgagcggatacatatttgaatgtatttagaaaaataaacaaataggggttccgcgcacatttccccgaaaagtgccacctgac

SEQ ID NO: 737 - skipped

SEQ ID NO: 738 - DNA, 8323 bp, synthetic construct
  misc_feature 1..8323: note = Synthetic
  source 1..8323: mol_type = other DNA
taacaaattggctgtggtatataaaattattcataatgatagtaggaggcttggtaggtttaagaatagtttttgctgtactttctatagtgaatagagttaggcagggatattcaccattatcgtttcagacccacctcccaaccccgaggggacccagagagggcctatttcccatgattccttcatatttgcatatacgatacaaggctgttagagagataattagaattaatttgactgtaaacacaaagatattagtacaaaatacgtgacgtagaaagtaataatttcttgggtagtttgcagttttaaaattatgttttaaaatggactatcatatgcttaccgtaacttgaaagtatttcgatttcttggctttatatatcttgtggaaaggacgaaacaccgccgcgcgcgcgaaaaagccggttttagagctagaaatagcaagttaaaataaggctagtccgttatcaacttgaaaaagtggcaccgagtcggtgcttttttaagcttggcgtaactagatcttgagacaaatggcagtattcatccacaattttaaaagaaaaggggggattggggggtacagtgcaggggaaagaatagtagacataatagcaacagacatacaaactaaagaattacaaaaacaaattacaaaaattcaaaattttcgggtttattacagggacagcagagatccactttggcgccggctcgagggggcccgggtgcaaagatggataaagttttaaacagagaggaatctttgcagctaatggaccttctaggtcttgaaaggagtgggaattggctccggtgcccgtcagtgggcagagcgcacatcgcccacagtccccgagaagttggggggaggggtcggcaattgatccggtgcctagagaaggtggcgcggggtaaactgggaaagtgatgtcgtgtactggctccgcctttttcccgagggtgggggagaaccgtatataagtgcagtagtcgccgtgaacgttctttttcgcaacgggtttgccgccagaacacaggtaagtgccgtgtgtggttcccgcgggcctggcctctttacgggttatggcccttgcgtgccttgaattacttccacctggctgcagtacgtgattcttgatcccgagcttcgggttggaagtgggtgggagagttcgaggccttgcgcttaaggagccccttcgcctcgtgcttgagttgaggcctggcctgggcgctggggccgccgcgtgcgaatctggtggcaccttcgcgcctgtctcgctgctttcgataagtctctagccatttaaaatttttgatgacctgctgcgacgctttttttctggcaagatagtcttgtaaatgcgggccaagatctgcacactggtatttcggtttttggggccgcgggcggcgacggggcccgtgcgtcccagcgcacatgttcggcgaggcggggcctgcgagcgcggccaccgagaatcggacgggggtagtctcaagctggccggcctgctctggtgcctggcctcgcgccgccgtgtatcgccccgccctgggcggcaaggctggcccggtcggcaccagttgcgtgagcggaaagatggccgcttcccggccctgctgcagggagctcaaaatggaggacgcggcgctcgggagagcgggcgggtgagtcacccacacaaaggaaaagggcctttccgtcctcagccgtcgcttcatgtgactccacggagtaccgggcgccgtccaggcacctcgattagttctcgagcttttggagtacgtcgtctttaggttggggggaggggttttatgcgatggagtttccccacactgagtgggtggagactgaagttaggccagcttggcacttgatgtaattctccttggaatttgccctttttgagtttggatcttggttcattctcaagcctcagacagtggttcaaagtttttttcttccatttcaggtgtcgtgacgtacggccaccatgaccgagtacaagcccacggtgcgcctcgccacccgcgacgacgtccccagggccgtacgcaccctcgccgccgcgttcgccgactaccccgccacgcgccacaccgtcgatccggaccgccacatcgagcgggtcaccgagctgcaagaactcttcctcacgcgcgtcgggctcgacatcggcaaggtgtgggtcgcggacgacggcgccgccgtggcggtctggaccacgccggagagcgtcgaagcgggggcggtgttcgccgagatcggcccgcgcatggccgagttgagcggttcccggctggccgcgcagcaacagatggaaggcctcctggcgccgcaccggcccaaggagcccgcgtggttcctggccaccgtcggagtctcgcccgaccaccagggcaagggtctgggcagcgccgtcgtgctccccggagtggaggcggccgagcgcgccggggtgcccgccttcctggagacctccgcgccccgcaacctccccttctacgagcggctcggcttcaccgtcaccgccgacgtcgaggtgcccgaaggaccgcgcacctggtgcatgacccgcaagcccggtgcctgaacgcgttaagtcgacaatcaacctctggattacaaaatttgtgaaagattgactggtattcttaactatgttgctccttttacgctatgtggatacgctgctttaatgcctttgtatcatgctattgcttcccgtatggctttcattttctcctccttgtataaatcctggttgctgtctctttatgaggagttgtggcccgttgtcaggcaacgtggcgtggtgtgcactgtgtttgctgacgcaacccccactggttggggcattgccaccacctgtcagctcctttccgggactttcgctttccccctccctattgccacggcggaactcatcgccgcctgccttgcccgctgctggacaggggctcggctgttgggcactgacaattccgtggtgttgtcggggaaatcatcgtcctttccttggctgctcgcctgtgttgccacctggattctgcgcgggacgtccttctgctacgtcccttcggccctcaatccagcggaccttccttcccgcggcctgctgccggctctgcggcctcttccgcgtcttcgccttcgccctcagacgagtcggatctccctttgggccgcctccccgcgtcgactttaagaccaatgacttacaaggcagctgtagatcttagccactttttaaaagaaaaggggggactggaagggctaattcactcccaacgaagacaagatctgctttttgcttgtactgggtctctctggttagaccagatctgagcctgggagctctctggctaactagggaacccactgcttaagcctcaataaagcttgccttgagtgcttcaagtagtgtgtgcccgtctgttgtgtgactctggtaactagagatccctcagacccttttagtcagtgtggaaaatctctagcagtacgtatagtagttcatgtcatcttattattcagtatttataacttgcaaagaaatgaatatcagagagtgagaggaacttgtttattgcagcttataatggttacaaataaagcaatagcatcacaaatttcacaaataaagcatttttttcactgcattctagttgtggtttgtccaaactcatcaatgtatcttatcatgtctggctctagctatcccgcccctaactccgcccatcccgcccctaactccgcccagttccgcccattctccgccccatggctgactaattttttttatttatgcagaggccgaggccgcctcggcctctgagctattccagaagtagtgaggaggcttttttggaggcctagggacgtacccaattcgccctatagtgagtcgtattacgcgcgctcactggccgtcgttttacaacgtcgtgactgggaaaaccctggcgttacccaacttaatcgccttgcagcacatccccctttcgccagctggcgtaatagcgaagaggcccgcaccgatcgcccttcccaacagttgcgcagcctgaatggcgaatgggacgcgccctgtagcggcgcattaagcgcggcgggtgtggtggttacgcgcagcgtgaccgctacacttgccagcgccctagcgcccgctcctttcgctttcttcccttcctttctcgccacgttcgccggctttccccgtcaagctctaaatcgggggctccctttagggttccgatttagtgctttacggcacctcgaccccaaaaaacttgattagggtgatggttcacgtagtgggccatcgccctgatagacggtttttcgccctttgacgttggagtccacgttctttaatagtggactcttgttccaaactggaacaacactcaaccctatctcggtctattcttttgatttataagggattttgccgatttcggcctattggttaaaaaatgagctgatttaacaaaaatttaacgcgaattttaacaaaatattaacgcttacaatttaggtggcacttttcggggaaatgtgcgcggaacccctatttgtttatttttctaaatacattcaaatatgtatccgctcatgagacaataaccctgataaatgcttcaataatattgaaaaaggaagagtatgagtattcaacatttccgtgtcgcccttattcccttttttgcggcattttgccttcctgtttttgctcacccagaaacgctggtgaaagtaaaagatgctgaagatcagttgggtgcacgagtgggttacatcgaactggatctcaacagcggtaagatccttgagagttttcgccccgaagaacgttttccaatgatgagcacttttaaagttctgctatgtggcgcggtattatcccgtattgacgccgggcaagagcaactcggtcgccgcatacactattctcagaatgacttggttgagtactcaccagtcacagaaaagcatcttacggatggcatgacagtaagagaattatgcagtgctgccataaccatgagtgataacactgcggccaacttacttctgacaacgatcggaggaccgaaggagctaaccgcttttttgcacaacatgggggatcatgtaactcgccttgatcgttgggaaccggagctgaatgaagccataccaaacgacgagcgtgacaccacgatgcctgtagcaatggcaacaacgttgcgcaaactattaactggcgaactacttactctagcttcccggcaacaattaatagactggatggaggcggataaagttgcaggaccacttctgcgctcggcccttccggctggctggtttattgctgataaatctggagccggtgagcgtgggtctcgcggtatcattgcagcactggggccagatggtaagccctcccgtatcgtagttatctacacgacggggagtcaggcaactatggatgaacgaaatagacagatcgctgagataggtgcctcactgattaagcattggtaactgtcagaccaagtttactcatatatactttagattgatttaaaacttcatttttaatttaaaaggatctaggtgaagatcctttttgataatctcatgaccaaaatcccttaacgtgagttttcgttccactgagcgtcagaccccgtagaaaagatcaaaggatcttcttgagatcctttttttctgcgcgtaatctgctgcttgcaaacaaaaaaaccaccgctaccagcggtggtttgtttgccggatcaagagctaccaactctttttccgaaggtaactggcttcagcagagcgcagataccaaatactgttcttctagtgtagccgtagttaggccaccacttcaagaactctgtagcaccgcctacatacctcgctctgctaatcctgttaccagtggctgctgccagtggcgataagtcgtgtcttaccgggttggactcaagacgatagttaccggataaggcgcagcggtcgggctgaacggggggttcgtgcacacagcccagcttggagcgaacgacctacaccgaactgagatacctacagcgtgagctatgagaaagcgccacgcttcccgaagggagaaaggcggacaggtatccggtaagcggcagggtcggaacaggagagcgcacgagggagcttccagggggaaacgcctggtatctttatagtcctgtcgggtttcgccacctctgacttgagcgtcgatttttgtgatgctcgtcaggggggcggagcctatggaaaaacgccagcaacgcggcctttttacggttcctggccttttgctggccttttgctcacatgttctttcctgcgttatcccctgattctgtggataaccgtattaccgcctttgagtgagctgataccgctcgccgcagccgaacgaccgagcgcagcgagtcagtgagcgaggaagcggaagagcgcccaatacgcaaaccgcctctccccgcgcgttggccgattcattaatgcagctggcacgacaggtttcccgactggaaagcgggcagtgagcgcaacgcaattaatgtgagttagctcactcattaggcaccccaggctttacactttatgcttccggctcgtatgttgtgtggaattgtgagcggataacaatttcacacaggaaacagctatgaccatgattacgccaagcgcgcaattaaccctcactaaagggaacaaaagctggagctgcaagcttaatgtagtcttatgcaatactcttgtagtcttgcaacatggtaacgatgagttagcaacatgccttacaaggagagaaaaagcaccgtgcatgccgattggtggaagtaaggtggtacgatcgtgccttattaggaaggcaacagacgggtctgacatggattggacgaaccactgaattgccgcattgcagagatattgtatttaagtgcctagctcgatacataaacgggtctctctggttagaccagatctgagcctgggagctctctggctaactagggaacccactgcttaagcctcaataaagcttgccttgagtgcttcaagtagtgtgtgcccgtctgttgtgtgactctggtaactagagatccctcagacccttttagtcagtgtggaaaatctctagcagtggcgcccgaacagggacttgaaagcgaaagggaaaccagaggagctctctcgacgcaggactcggcttgctgaagcgcgcacggcaagaggcgaggggcggcgactggtgagtacgccaaaaattttgactagcggaggctagaaggagagagatgggtgcgagagcgtcagtattaagcgggggagaattagatcgcgatgggaaaaaattcggttaaggccagggggaaagaaaaaatataaattaaaacatatagtatgggcaagcagggagctagaacgattcgcagttaatcctggcctgttagaaacatcagaaggctgtagacaaatactgggacagctacaaccatcccttcagacaggatcagaagaacttagatcattatataatacagtagcaaccctctattgtgtgcatcaaaggatagagataaaagacaccaaggaagctttagacaagatagaggaagagcaaaacaaaagtaagaccaccgcacagcaagcggccgctgatcttcagacctggaggaggagatatgagggacaattggagaagtgaattatataaatataaagtagtaaaaattgaaccattaggagtagcacccaccaaggcaaagagaagagtggtgcagagagaaaaaagagcagtgggaataggagctttgttccttgggttcttgggagcagcaggaagcactatgggcgcagcgtcaatgacgctgacggtacaggccagacaattattgtctggtatagtgcagcagcagaacaatttgctgagggctattgaggcgcaacagcatctgttgcaactcacagtctggggcatcaagcagctccaggcaagaatcctggctgtggaaagatacctaaaggatcaacagctcctggggatttggggttgctctggaaaactcatttgcaccactgctgtgccttggaatgctagttggagtaataaatctctggaacagatttggaatcacacgacctggatggagtgggacagagaaattaacaattacacaagcttaatacactccttaattgaagaatcgcaaaaccagcaagaaaagaatgaacaagaattattggaattagataaatgggcaagtttgtggaattggtttaaca

SEQ ID NO: 739 - protein, 677 aa, unidentified; identical to SEQ ID NO: 89
  REGION 1..677: note = moloney murine leukemia virus

SEQ ID NO: 740 - protein, 677 aa, synthetic construct; identical to SEQ ID NO: 108
  REGION 1..677: note = Synthetic

SEQ ID NO: 741 - protein, 677 aa, synthetic construct; identical to SEQ ID NO: 122
  REGION 1..677: note = Synthetic

SEQ ID NO: 742 - protein, 677 aa, synthetic construct
  REGION 1..677: note = Synthetic
TLNIEDEYRLHETSKEPDVSLGSTWLSDFPQAWAETGGMGLAVRQAPLIIPLKATSTPVSIKQYPMSQEARLGIKPHIQRLLDQGILVPCQSPWNTPLLPVKLPGTNDYSPVQDLREVNKRVEDIHPTVPNPYNLLSGLPPSHQWYTVLDLKDAFFCLRLHPTSQPLFAFEWRDPEMGISGQLTWTRLPQGFKNSPTLFNEALHRDLADFRIQHPDLILLQYVDDLLLAATSELDCQQGTRALLQTLGNLGYRASAKKAQICQKQVKYLGYLLKEGQRWLTEARKETVMGQPTPKTPRQLREFLGTAGFCRLWIPGFAEMAAPLYPLTKPGTLFNWGPDQQKAYQEIKQALLTAPALGLPDLTKPFELFVDEKQGYAKGVLTQKLGPWRRPVAYLSKKLDPVAAGWPPCLRMVAAIAVLTKDAGKLTMGQPLVILAPHAVEALVKQPPDRWLSNARMTHYQALLLDTDRVQFGPVVALNPATLLPLPEEGLQHNCLDILAEAHGTRPDLTDQPLPDADHTWYTDGSSLLQEGQRKAGAAVTTETEVIWAKALPAGTSAQRAELIALTQALKMAEGKKLNVYTDSRYAFATAHIHGEIYRRRGWLTSEGKEIKNKDEILALLKALFLPKRLSIIHCPGHQKGHSAEARGNRMADQAARKAAITETPDTSTLLIENSSP

SEQ ID NO: 743 - DNA, 41 bp, synthetic construct
  misc_feature 1..41: note = Synthetic
  source 1..41: mol_type = other DNA
cgtatcggtaactgatccgatggaaagccagttcagaaccg

SEQ ID NO: 744 - DNA, 41 bp, synthetic construct
  misc_feature 1..41: note = Synthetic
  source 1..41: mol_type = other DNA
cgtatcggtaactgatccgatggaatgccaggtcagaaccg

SEQ ID NO: 745 - DNA, 41 bp, synthetic construct
  misc_feature 1..41: note = Synthetic
  source 1..41: mol_type = other DNA
cgtatcggtaactgatccgatggaatgccaggtcaaaacgg

SEQ ID NO: 746 - DNA, 41 bp, synthetic construct; identical to SEQ ID NO: 743
  misc_feature 1..41: note = Synthetic
  source 1..41: mol_type = other DNA

SEQ ID NO: 747 - DNA, 38 bp, synthetic construct
  misc_feature 1..38: note = Synthetic
  source 1..38: mol_type = other DNA
cgtatcggtaactgatccgatgggccagttcagaaccg

SEQ ID NO: 748 - DNA, 35 bp, synthetic construct
  misc_feature 1..35: note = Synthetic
  source 1..35: mol_type = other DNA
cgtatcggtaactgatccgatggagttcagaaccg

SEQ ID NO: 749 - DNA, 23 bp, synthetic construct
  misc_feature 1..23: note = Synthetic
  source 1..23: mol_type = other DNA
cgtatcgtatcgtatcgtattgg

SEQ ID NO: 750 - DNA, 28 bp, synthetic construct
  misc_feature 1..28: note = Synthetic
  source 1..28: mol_type = other DNA
cgtatcgtatcgtatcgtatcgtattgg

SEQ ID NO: 751 - DNA, 33 bp, synthetic construct
  misc_feature 1..33: note = Synthetic
  source 1..33: mol_type = other DNA
cgtatcgtatcgtatcgtatcgtatcgtattgg

SEQ ID NO: 752 - DNA, 26 bp, synthetic construct
  misc_feature 1..26: note = Synthetic
  source 1..26: mol_type = other DNA
cgtatcggtaactgatccgatggaaa

SEQ ID NO: 753 - DNA, 53 bp, synthetic construct
  misc_feature 1..53: note = Synthetic
  source 1..53: mol_type = other DNA
gcgtatcggtaactgatccgatttccatcggggccaggagatcagttaccgat

SEQ ID NO: 754 - DNA, 36 bp, synthetic construct
  misc_feature 1..36: note = Synthetic
  source 1..36: mol_type = other DNA
cgtatcggtaactgaatctcctggccccgatggaaa

SEQ ID NO: 755 - DNA, 53 bp, synthetic construct
  misc_feature 1..53: note = Synthetic
  source 1..53: mol_type = other DNA
gcgtatcggtaactgatctccgggccaggatttccatcggatcagttaccgat

SEQ ID NO: 756 - DNA, 44 bp, synthetic construct
  misc_feature 1..44: note = Synthetic
  source 1..44: mol_type = other DNA
cgtatcggtaactgatccgatggaaatcctggccccgatggaaa

SEQ ID NO: 757 - DNA, 905 bp, synthetic construct; identical to SEQ ID NO: 223
  misc_feature 1..905: note = Synthetic
  source 1..905: mol_type = other DNA

SEQ ID NO: 758 - DNA, 942 bp, synthetic construct; identical to SEQ ID NO: 224
  misc_feature 1..942: note = Synthetic
  source 1..942: mol_type = other DNA

SEQ ID NO: 759 - DNA, 1370 bp, synthetic construct; identical to SEQ ID NO: 225
  misc_feature 1..1370: note = Synthetic
  source 1..1370: mol_type = other DNA

SEQ ID NO: 760 - DNA, 807 bp, synthetic construct; identical to SEQ ID NO: 226
  misc_feature 1..807: note = Synthetic
  source 1..807: mol_type = other DNA

SEQ ID NO: 761 - DNA, 743 bp, synthetic construct; identical to SEQ ID NO: 227
  misc_feature 1..743: note = Synthetic
  source 1..743: mol_type = other DNA

SEQ ID NO: 762 - DNA, 98 bp, synthetic construct
  misc_feature 1..98: note = Synthetic
  source 1..98: mol_type = other DNA
gccaacatgaggatcacccatgtctgcagggcctggaggaagcagggcttcctttcctctgccatcaatgatggtgatgatggtgcgtgctcagtctg

SEQ ID NO: 763 - DNA, 33 bp, synthetic construct
  misc_feature 1..33: note = Synthetic
  source 1..33: mol_type = other DNA
gccaacatgaggatcacccatgtctgcagggcc

SEQ ID NO: 764 - protein, 131 aa, synthetic construct
  REGION 1..131: note = Synthetic
GSASNFTQFVLVDNGGTGDVTVAPSNFANGVAEWISSNSRSQAYKVTCSVRQSSAQNRKYTIKVEVPKVATQTVGGEELPVAGWRSYLNMELTIPIFATNSDCELIVKAMQGLLKDGNPIPSAIAANSGIY

SEQ ID NO: 765 - protein, 1943 aa, synthetic construct
  REGION 1..1943: note = Synthetic
MKRTADGSEFESPKKKRKVDKKYSIGLDIGTNSVGWAVITDEYKVPSKKFKVLGNTDRHSIKKNLIGALLFDSGETAEATRLKRTARRRYTRRKNRICYLQEIFSNEMAKVDDSFFHRLEESFLVEEDKKHERHPIFGNIVDEVAYHEKYPTIYHLRKKLVDSTDKADLRLIYLALAHMIKFRGHFLIEGDLNPDNSDVDKLFIQLVQTYNQLFEENPINASGVDAKAILSARLSKSRRLENLIAQLPGEKKNGLFGNLIALSLGLTPNFKSNFDLAEDAKLQLSKDTYDDDLDNLLAQIGDQYADLFLAAKNLSDAILLSDILRVNTEITKAPLSASMIKRYDEHHQDLTLLKALVRQQLPEKYKEIFFDQSKNGYAGYIDGGASQEEFYKFIKPILEKMDGTEELLVKLNREDLLRKQRTFDNGSIPHQIHLGELHAILRRQEDFYPFLKDNREKIEKILTFRIPYYVGPLARGNSRFAWMTRKSEETITPWNFEEVVDKGASAQSFIERMTNFDKNLPNEKVLPKHSLLYEYFTVYNELTKVKYVTEGMRKPAFLSGEQKKAIVDLLFKTNRKVTVKQLKEDYFKKIECFDSVEISGVEDRFNASLGTYHDLLKIIKDKDFLDNEENEDILEDIVLTLTLFEDREMIEERLKTYAHLFDDKVMKQLKRRRYTGWGRLSRKLINGIRDKQSGKTILDFLKSDGFANRNFMQLIHDDSLTFKEDIQKAQVSGQGDSLHEHIANLAGSPAIKKGILQTVKVVDELVKVMGRHKPENIVIEMARENQTTQKGQKNSRERMKRIEEGIKELGSQILKEHPVENTQLQNEKLYLYYLQNGRDMYVDQELDINRLSDYDVDAIVPQSFLKDDSIDNKVLTRSDKNRGKSDNVPSEEVVKKMKNYWRQLLNAKLITQRKFDNLTKAERGGLSELDKAGFIKRQLVETRQITKHVAQILDSRMNTKYDENDKLIREVKVITLKSKLVSDFRKDFQFYKVREINNYHHAHDAYLNAVVGTALIKKYPKLESEFVYGDYKVYDVRKMIAKSEQEIGKATAKYFFYSNIMNFFKTEITLANGEIRKRPLIETNGETGEIVWDKGRDFATVRKVLSMPQVNIVKKTEVQTGGFSKESILPKRNSDKLIARKKDWDPKKYGGFDSPTVAYSVLVVAKVEKGKSKKLKSVKELLGITIMERSSFEKNPIDFLEAKGYKEVKKDLIIKLPKYSLFELENGRKRMLASAGELQKGNELALPSKYVNFLYLASHYEKLKGSPEDNEQKQLFVEQHKHYLDEIIEQISEFSKRVILADANLDKVLSAYNKHRDKPIREQAENIIHLFTLTNLGAPAAFKYFDTTIDRKRYTSTKEVLDATLIHQSITGLYETRIDLSQLGGDSGGSSGGSSGSETPGTSESATPESSGGSSGGSSTLNIEDEYRLHETSKEPDVSLGSTWLSDFPQAWAETGGMGLAVRQAPLIIPLKATSTPVSIKQYPMSQEARLGIKPHIQRLLDQGILVPCQSPWNTPLLPVKKPGTNDYRPVQDLREVNKRVEDIHPTVPNPYNLLSGLPPSHQWYTVLDLKDAFFCLRLHPTSQPLFAFEWRDPEMGISGQLTWTRLPQGFKNSPTLFNEALHRDLADFRIQHPDLILLQYVDDLLLAATSELDCQQGTRALLQTLGNLGYRASAKKAQICQKQVKYLGYLLKEGQRWLTEARKETVMGQPTPKTPRQLREFLGKAGFCRLFIPGFAEMAAPLYPLTKPGTLFNWGPDQQKAYQEIKQALLTAPALGLPDLTKPFELFVDEKQGYAKGVLTQKLGPWRRPVAYLSKKLDPVAAGWPPCLRMVAAIAVLTKDAGKLTMGQPLVILAPHAVEALVKQPPDRWLSNARMTHYQALLLDTDRVQFGPVVALNPATLLPLPEEGLQHNCLDNSRLINSGGSKRTADGSEFEPKKKRKV

SEQ ID NO: 766 - protein, 503 aa, synthetic construct
  REGION 1..503: note = Synthetic
TLNIEDEYRLHETSKEPDVSLGSTWLSDFPQAWAETGGMGLAVRQAPLIIPLKATSTPVSIKQYPMSQEARLGIKPHIQRLLDQGILVPCQSPWNTPLLPVKKPGTNDYRPVQDLREVNKRVEDIHPTVPNPYNLLSGLPPSHQWYTVLDLKDAFFCLRLHPTSQPLFAFEWRDPEMGISGQLTWTRLPQGFKNSPTLFNEALHRDLADFRIQHPDLILLQYVDDLLLAATSELDCQQGTRALLQTLGNLGYRASAKKAQICQKQVKYLGYLLKEGQRWLTEARKETVMGQPTPKTPRQLREFLGKAGFCRLFIPGFAEMAAPLYPLTKPGTLFNWGPDQQKAYQEIKQALLTAPALGLPDLTKPFELFVDEKQGYAKGVLTQKLGPWRRPVAYLSKKLDPVAAGWPPCLRMVAAIAVLTKDAGKLTMGQPLVILAPHAVEALVKQPPDRWLSNARMTHYQALLLDTDRVQFGPVVALNPATLLPLPEEGLQHNCLDNSRLIN

SEQ ID NO: 767 - skipped

SEQ ID NO: 768 - protein, 6 aa, synthetic construct
  REGION 1..6: note = Synthetic
GGSGGS

SEQ ID NO: 769 - protein, 9 aa, synthetic construct
  REGION 1..9: note = Synthetic
GGSGGSGGS

SEQ ID NO: 770-772 - skipped (3 entries)

SEQ ID NO: 773 - DNA, 102 bp, synthetic construct
  misc_feature 1..102: note = Synthetic
  source 1..102: mol_type = other DNA
gccaacatgaggatcacccatgtctgcagggcctggaggaagcagggcttcctttcctctgccatcaatgatggtgatgatggtgcgtgctcagtctgggcc

SEQ ID NO: 774 - DNA, 112 bp, synthetic construct
  misc_feature 1..112: note = Synthetic
  source 1..112: mol_type = other DNA
ggaggaagcagggcttcctttcctctgccatcaatgatggtgatgatggtgcgtgctcagtctgaaattaacaaatcaagccaacatgaggatcacccatgtctgcagggcc

SEQ ID NO: 775 - DNA, 116 bp, synthetic construct
  misc_feature 1..116: note = Synthetic
  source 1..116: mol_type = other DNA
ggaggaagcagggcttcctttcctctgccatcaatgatggtgatgatggtgcgtgctcagtctgggccaaattaacaaatcaagccaacatgaggatcacccatgtctgcagggcc

SEQ ID NO: 776 - DNA, 148 bp, synthetic construct
  misc_feature 1..148: note = Synthetic
  source 1..148: mol_type = other DNA
ggcccagactgagcacgtgagttttagagctaggccaacatgaggatcacccatgtctgcagggcctagcaagttaaaataaggctagtccgttatcaacttgaaaaagtgggaccgagtcggtcctctgccatctcgtgctcagtct

SEQ ID NO: 777 - DNA, 148 bp, synthetic construct
  misc_feature 1..148: note = Synthetic
  source 1..148: mol_type = other DNA
ggcccagactgagcacgtgagttttagagctagaaatagcaagttaaaataaggctagtccgttatcaacttggccaacatgaggatcacccatgtctgcagggccaagtgggaccgagtcggtcctctgccatctcgtgctcagtct

SEQ ID NO: 778 - protein, 2281 aa, synthetic construct
  REGION 1..2281: note = Synthetic
MKRTADGSEFESPKKKRKVGSASNFTQFVLVDNGGTGDVTVAPSNFANGVAEWISSNSRSQAYKVTCSVRQSSAQNRKYTIKVEVPKVATQTVGGEELPVAGWRSYLNMELTIPIFATNSDCELIVKAMQGLLKDGNPIPSAIAANSGIYSGGSSGGSSGSETPGTSESATPESSGGSSGGSSDKKYSIGLDIGTNSVGWAVITDEYKVPSKKFKVLGNTDRHSIKKNLIGALLFDSGETAEATRLKRTARRRYTRRKNRICYLQEIFSNEMAKVDDSFFHRLEESFLVEEDKKHERHPIFGNIVDEVAYHEKYPTIYHLRKKLVDSTDKADLRLIYLALAHMIKFRGHFLIEGDLNPDNSDVDKLFIQLVQTYNQLFEENPINASGVDAKAILSARLSKSRRLENLIAQLPGEKKNGLFGNLIALSLGLTPNFKSNFDLAEDAKLQLSKDTYDDDLDNLLAQIGDQYADLFLAAKNLSDAILLSDILRVNTEITKAPLSASMIKRYDEHHQDLTLLKALVRQQLPEKYKEIFFDQSKNGYAGYIDGGASQEEFYKFIKPILEKMDGTEELLVKLNREDLLRKQRTFDNGSIPHQIHLGELHAILRRQEDFYPFLKDNREKIEKILTFRIPYYVGPLARGNSRFAWMTRKSEETITPWNFEEVVDKGASAQSFIERMTNFDKNLPNEKVLPKHSLLYEYFTVYNELTKVKYVTEGMRKPAFLSGEQKKAIVDLLFKTNRKVTVKQLKEDYFKKIECFDSVEISGVEDRFNASLGTYHDLLKIIKDKDFLDNEENEDILEDIVLTLTLFEDREMIEERLKTYAHLFDDKVMKQLKRRRYTGWGRLSRKLINGIRDKQSGKTILDFLKSDGFANRNFMQLIHDDSLTFKEDIQKAQVSGQGDSLHEHIANLAGSPAIKKGILQTVKVVDELVKVMGRHKPENIVIEMARENQTTQKGQKNSRERMKRIEEGIKELGSQILKEHPVENTQLQNEKLYLYYLQNGRDMYVDQELDINRLSDYDVDAIVPQSFLKDDSIDNKVLTRSDKNRGKSDNVPSEEVVKKMKNYWRQLLNAKLITQRKFDNLTKAERGGLSELDKAGFIKRQLVETRQITKHVAQILDSRMNTKYDENDKLIREVKVITLKSKLVSDFRKDFQFYKVREINNYHHAHDAYLNAVVGTALIKKYPKLESEFVYGDYKVYDVRKMIAKSEQEIGKATAKYFFYSNIMNFFKTEITLANGEIRKRPLIETNGETGEIVWDKGRDFATVRKVLSMPQVNIVKKTEVQTGGFSKESILPKRNSDKLIARKKDWDPKKYGGFDSPTVAYSVLVVAKVEKGKSKKLKSVKELLGITIMERSSFEKNPIDFLEAKGYKEVKKDLIIKLPKYSLFELENGRKRMLASAGELQKGNELALPSKYVNFLYLASHYEKLKGSPEDNEQKQLFVEQHKHYLDEIIEQISEFSKRVILADANLDKVLSAYNKHRDKPIREQAENIIHLFTLTNLGAPAAFKYFDTTIDRKRYTSTKEVLDATLIHQSITGLYETRIDLSQLGGDSGGSSGGSSGSETPGTSESATPESSGGSSGGSSTLNIEDEYRLHETSKEPDVSLGSTWLSDFPQAWAETGGMGLAVRQAPLIIPLKATSTPVSIKQYPMSQEARLGIKPHIQRLLDQGILVPCQSPWNTPLLPVKKPGTNDYRPVQDLREVNKRVEDIHPTVPNPYNLLSGLPPSHQWYTVLDLKDAFFCLRLHPTSQPLFAFEWRDPEMGISGQLTWTRLPQGFKNSPTLFNEALHRDLADFRIQHPDLILLQYVDDLLLAATSELDCQQGTRALLQTLGNLGYRASAKKAQICQKQVKYLGYLLKEGQRWLTEARKETVMGQPTPKTPRQLREFLGKAGFCRLFIPGFAEMAAPLYPLTKPGTLFNWGPDQQKAYQEIKQALLTAPALGLPDLTKPFELFVDEKQGYAKGVLTQKLGPWRRPVAYLSKKLDPVAAGWPPCLRMVAAIAVLTKDAGKLTMGQPLVILAPHAVEALVKQPPDRWLSNARMTHYQALLLDTDRVQFGPVVALNPATLLPLPEEGLQHNCLDILAEAHGTRPDLTDQPLPDADHTWYTDGSSLLQEGQRKAGAAVTTETEVIWAKALPAGTSAQRAELIALTQALKMAEGKKLNVYTDSRYAFATAHIHGEIYRRRGWLTSEGKEIKNKDEILALLKALFLPKRLSIIHCPGHQKGHSAEARGNRMADQAARKAAITETPDTSTLLIENSSPSGGSKRTADGSEFEPKKKRKV

SEQ ID NO: 779 - protein, 881 aa, synthetic construct
  REGION 1..881: note = Synthetic
MKRTADGSEFESPKKKRKVGSASNFTQFVLVDNGGTGDVTVAPSNFANGVAEWISSNSRSQAYKVTCSVRQSSAQNRKYTIKVEVPKVATQTVGGEELPVAGWRSYLNMELTIPIFATNSDCELIVKAMQGLLKDGNPIPSAIAANSGIYSGGSSGGSSGSETPGTSESATPESSGGSSGGSSTLNIEDEYRLHETSKEPDVSLGSTWLSDFPQAWAETGGMGLAVRQAPLIIPLKATSTPVSIKQYPMSQEARLGIKPHIQRLLDQGILVPCQSPWNTPLLPVKKPGTNDYRPVQDLREVNKRVEDIHPTVPNPYNLLSGLPPSHQWYTVLDLKDAFFCLRLHPTSQPLFAFEWRDPEMGISGQLTWTRLPQGFKNSPTLFDEALHRDLADFRIQHPDLILLQYVDDLLLAATSELDCQQGTRALLQTLGNLGYRASAKKAQICQKQVKYLGYLLKEGQRWLTEARKETVMGQPTPKTPRQLREFLGTAGFCRLWIPGFAEMAAPLYPLTKTGTLFNWGPDQQKAYQEIKQALLTAPALGLPDLTKPFELFVDEKQGYAKGVLTQKLGPWRRPVAYLSKKLDPVAAGWPPCLRMVAAIAVLTKDAGKLTMGQPLVILAPHAVEALVKQPPDRWLSNARMTHYQALLLDTDRVQFGPVVALNPATLLPLPEEGLQHNCLDILAEAHGTRPDLTDQPLPDADHTWYTDGSSLLQEGQRKAGAAVTTETEVIWAKALPAGTSAQRAELIALTQALKMAEGKKLNVYTDSRYAFATAHIHGEIYRRRGLLTSEGKEIKNKDEILALLKALFLPKRLSIIHCPGHQKGHSAEARGNRMADQAARKAAITETPDTSTLLIENSSPSGGSKRTADGSEFEPKKKRKV

SEQ ID NO: 780 - protein, 881 aa, synthetic construct
  REGION 1..881: note = Synthetic
MKRTADGSEFESPKKKRKVTLNIEDEYRLHETSKEPDVSLGSTWLSDFPQAWAETGGMGLAVRQAPLIIPLKATSTPVSIKQYPMSQEARLGIKPHIQRLLDQGILVPCQSPWNTPLLPVKKPGTNDYRPVQDLREVNKRVEDIHPTVPNPYNLLSGLPPSHQWYTVLDLKDAFFCLRLHPTSQPLFAFEWRDPEMGISGQLTWTRLPQGFKNSPTLFDEALHRDLADFRIQHPDLILLQYVDDLLLAATSELDCQQGTRALLQTLGNLGYRASAKKAQICQKQVKYLGYLLKEGQRWLTEARKETVMGQPTPKTPRQLREFLGTAGFCRLWIPGFAEMAAPLYPLTKTGTLFNWGPDQQKAYQEIKQALLTAPALGLPDLTKPFELFVDEKQGYAKGVLTQKLGPWRRPVAYLSKKLDPVAAGWPPCLRMVAAIAVLTKDAGKLTMGQPLVILAPHAVEALVKQPPDRWLSNARMTHYQALLLDTDRVQFGPVVALNPATLLPLPEEGLQHNCLDILAEAHGTRPDLTDQPLPDADHTWYTDGSSLLQEGQRKAGAAVTTETEVIWAKALPAGTSAQRAELIALTQALKMAEGKKLNVYTDSRYAFATAHIHGEIYRRRGLLTSEGKEIKNKDEILALLKALFLPKRLSIIHCPGHQKGHSAEARGNRMADQAARKAAITETPDTSTLLIENSSPSGGSSGGSSGSETPGTSESATPESSGGSSGGSSGSASNFTQFVLVDNGGTGDVTVAPSNFANGVAEWISSNSRSQAYKVTCSVRQSSAQNRKYTIKVEVPKVATQTVGGEELPVAGWRSYLNMELTIPIFATNSDCELIVKAMQGLLKDGNPIPSAIAANSGIYSGGSKRTADGSEFEPKKKRKV

SEQ ID NO: 781 - DNA, 48 bp, synthetic construct
  misc_feature 1..48: note = Synthetic
  source 1..48: mol_type = other DNA
aggaaccccgggtctgactcgtgcactaccgtctcctttcctctgcag

SEQ ID NO: 782 - protein, 8 aa, synthetic construct
  REGION 1..8: note = Synthetic
SLGPRLST

SEQ ID NO: 783 - DNA, 45 bp, synthetic construct
  misc_feature 1..45: note = Synthetic
  source 1..45: mol_type = other DNA
aaccccgggtctgactcgtgcactaccgtctcgtgtcctctgcag

SEQ ID NO: 784 - protein, 7 aa, synthetic construct
  REGION 1..7: note = Synthetic
LGPRLST

SEQ ID NO: 785 - DNA, 48 bp, synthetic construct
  misc_feature 1..48: note = Synthetic
  source 1..48: mol_type = other DNA
tccttggggcccagactgagcacgtgatggcagaggaaaggagacgtc

SEQ ID NO: 786 - DNA, 48 bp, synthetic construct
  misc_feature 1..48: note = Synthetic
  source 1..48: mol_type = other DNA
tccttggggcccagactgagcacgagatggcagaggaaaggagacgtc

SEQ ID NO: 787 - DNA, 45 bp, synthetic construct
  misc_feature 1..45: note = Synthetic
  source 1..45: mol_type = other DNA
ttggggcccagactgagcacgtgatggcagagcacaggagacgtc

SEQ ID NO: 788 - DNA, 45 bp, synthetic construct
  misc_feature 1..45: note = Synthetic
  source 1..45: mol_type = other DNA
ttggggcccagactgagcacgagatggcagagcacaggagacgtc

SEQ ID NO: 789 - DNA, 297 bp, synthetic construct
  misc_feature 1..297: note = Synthetic
  source 1..297: mol_type = other DNA
atgtgggctgcctagaaaggcatggatgagagaagcctggagacagggatcccagggaaacgcccatgcaattagtctatttctgctgcaagtaagcatgcatttgtaggcttgatgctttttttctgcttctccagccctggcctgggtcaatccttggggcccagactgagcacgtgatggcagaggaaaggaagccctgcttcctccagagggcgtcgcaggacagcttttcctagacaggggctagtatgtgcagctcctgcaccgggatactggttgacaagtttggctggg

SEQ ID NO: 790 - DNA, 297 bp, synthetic construct
  misc_feature 1..297: note = Synthetic
  source 1..297: mol_type = other DNA
cccagccaaacttgtcaaccagtatcccggtgcaggagctgcacatactagcccctgtctaggaaaagctgtcctgcgacgccctctggaggaagcagggcttcctttcctctgccatcacgtgctcagtctgggccccaaggattgacccaggccagggctggagaagcagaaaaaaagcatcaagcctacaaatgcatgcttacttgcagcagaaatagactaattgcatgggcgtttccctgggatccctgtctccaggcttctctcatccatgcctttctaggcagcccacat

SEQ ID NO: 791 - DNA, 40 bp, synthetic construct
  misc_feature 1..40: note = Synthetic
  source 1..40: mol_type = other DNA
tggggcccagactgagcacgtgatggcagaggaaaggaag

SEQ ID NO: 792 - DNA, 40 bp, synthetic construct
  misc_feature 1..40: note = Synthetic
  source 1..40: mol_type = other DNA
tggggcccagactgagcacgtgatggcaaaggaaaggaag

SEQ ID NO: 793 - DNA, 40 bp, synthetic construct
  misc_feature 1..40: note = Synthetic
  source 1..40: mol_type = other DNA
tggggcccagactgagcacgagatggcagaggaaaggaag

SEQ ID NO: 794 - DNA, 40 bp, synthetic construct
  misc_feature 1..40: note = Synthetic
  source 1..40: mol_type = other DNA
tggggcccagactgagcacgagatggcaaaggaaaggaag

SEQ ID NO: 795 - DNA, 29 bp, synthetic construct
  misc_feature 1..29: note = Synthetic
  source 1..29: mol_type = other DNA
ctgagcacgtgatggcagaggaaaggaag

SEQ ID NO: 796 - DNA, 19 bp, synthetic construct
  misc_feature 1..19: note = Synthetic
  source 1..19: mol_type = other DNA
ctgagcacgggaaaggaag

SEQ ID NO: 797 - DNA, 29 bp, synthetic construct
  misc_feature 1..29: note = Synthetic
  source 1..29: mol_type = other DNA
ctgagcacgtgatggcaaaggaaaggaag

SEQ ID NO: 798 - skipped

SEQ ID NO: 799 - DNA, 16 bp, synthetic construct
  misc_feature 1..16: note = Synthetic
  source 1..16: mol_type = other DNA
ctgagcacgggaaagg

SEQ ID NO: 800 - DNA, 29 bp, synthetic construct
  misc_feature 1..29: note = Synthetic
  source 1..29: mol_type = other DNA
ctgagcacgtgatggcaggggaaaggaag

SEQ ID NO: 801 - DNA, 31 bp, synthetic construct
  misc_feature 1..31: note = Synthetic
  source 1..31: mol_type = other DNA
gactgagcacgtgatggcagaggaaaggaag

SEQ ID NO: 802 - DNA, 31 bp, synthetic construct
  misc_feature 1..31: note = Synthetic
  source 1..31: mol_type = other DNA
gactgagcacgcaccatcatcaccatcattg

SEQ ID NO: 803 - DNA, 31 bp, synthetic construct
  misc_feature 1..31: note = Synthetic
  source 1..31: mol_type = other DNA
gactgagcacgtgatggcaaaggaaaggaag

SEQ ID NO: 804 - DNA, 31 bp, synthetic construct
  misc_feature 1..31: note = Synthetic
  source 1..31: mol_type = other DNA
gactgagcacggattacaaggatgacgacga

SEQ ID NO: 805 - protein, 7 aa, synthetic construct
  REGION 1..7: note = Synthetic
GLGGTML

SEQ ID NO: 806 - DNA, 21 bp, synthetic construct
  misc_feature 1..21: note = Synthetic
  source 1..21: mol_type = other DNA
ggccttggcggctacatgctg

SEQ ID NO: 807 - DNA, 21 bp, synthetic construct
  misc_feature 1..21: note = Synthetic
  source 1..21: mol_type = other DNA
ggccttggcgtctacatgctg

SEQ ID NO: 808 - protein, 7 aa, synthetic construct
  REGION 1..7: note = Synthetic
GLGVTML

SEQ ID NO: 809 - DNA, 36 bp, synthetic construct
  misc_feature 1..36: note = Synthetic
  source 1..36: mol_type = other DNA
ggggcagtggtggggggccttggcggctacatgctg

SEQ ID NO: 810 - DNA, 43 bp, synthetic construct
  misc_feature 1..43: note = Synthetic
  source 1..43: mol_type = other DNA
gcagtggtggggggccttggatgtagacgccaaggccccccac

SEQ ID NO: 811 - protein, 25 aa, synthetic construct
  REGION 1..25: note = Synthetic
NFKIRHNIEDGSVQLADHYQQNTPI

SEQ ID NO: 812 - protein, 24 aa, synthetic construct
  REGION 1..24: note = Synthetic
NFKIHNIEDGSVQLADHYQQNTPI

SEQ ID NO: 813 - protein, 24 aa, synthetic construct
  REGION 1..24: note = Synthetic
NFKIRNIEDGSVQLADHYQQNTPI

SEQ ID NO: 814 - protein, 24 aa, synthetic construct
  REGION 1..24: note = Synthetic
NFKIRHNEDGSVQLADHYQQNTPI

SEQ ID NO: 815 - protein, 19 aa, synthetic construct
  REGION 1..19: note = Synthetic
NFKIRHNQLADHYQQNTPI

SEQ ID NO: 816 - protein, 20 aa, synthetic construct
  REGION 1..20: note = Synthetic
HNIEDGSVQLADHYQQNTPI

SEQ ID NO: 817 - protein, 14 aa, synthetic construct
  REGION 1..14: note = Synthetic
NFKIRHNIEDGSVQ

SEQ ID NO: 818 - DNA, 12 bp, synthetic construct
  misc_feature 1..12: note = Synthetic
  source 1..12: mol_type = other DNA
actgcaagtgca

SEQ ID NO: 819 - DNA, 12 bp, synthetic construct
  misc_feature 1..12: note = Synthetic
  source 1..12: mol_type = other DNA
tgcagtgttcac

SEQ ID NO: 820 - RNA, 122 nt, synthetic construct
  misc_feature 1..122: note = Synthetic
  source 1..122: mol_type = other RNA
ggcccagactgagcacgtgagttttagagctagaaatagcaagttaaaataaggctagtccgttatcaacttgaaaaagtggcaccgagtcggtgctctgccatctcgtgctcagtctgttt

SEQ ID NO: 821 - DNA, 28 bp, synthetic construct
  misc_feature 1..28: note = Synthetic
  source 1..28: mol_type = other DNA
ggcccagactgagcacgtgatggcagag

SEQ ID NO: 822 - DNA, 28 bp, synthetic construct
  misc_feature 1..28: note = Synthetic
  source 1..28: mol_type = other DNA
gagatggcagagcagggggggggggggg

SEQ ID NO: 823 - DNA, 31 bp, synthetic construct
  misc_feature 1..31: note = Synthetic
  source 1..31: mol_type = other DNA
gagatggcagagcaaaaaaaaaaaaaaaaaa

SEQ ID NO: 824 - DNA, 32 bp, synthetic construct
  misc_feature 1..32: note = Synthetic
  source 1..32: mol_type = other DNA
ggcccagactgagcacgtgatggcagagcaca

SEQ ID NO: 825 - DNA, 32 bp, synthetic construct
  misc_feature 1..32: note = Synthetic
  source 1..32: mol_type = other DNA
ggcccagactgagcacgagatggcagagcaca

SEQ ID NO: 826 - DNA, 24 bp, synthetic construct
  misc_feature 1..24: note = Synthetic
  source 1..24: mol_type = other DNA
tccagatggcacattgtcagaggg

SEQ ID NO: 827 - DNA, 24 bp, synthetic construct
  misc_feature 1..24: note = Synthetic
  source 1..24: mol_type = other DNA
tgacgggagggcagaactagtcct

SEQ ID NO: 828 - DNA, 24 bp, synthetic construct
  misc_feature 1..24: note = Synthetic
  source 1..24: mol_type = other DNA
ttcagacagcatatttgagtcatt

SEQ ID NO: 829 - DNA, 40 bp, synthetic construct
  misc_feature 1..40: note = Synthetic
  source 1..40: mol_type = other DNA
tggggcccagactgagcacgtgatggcagcggaaaggaag

SEQ ID NO: 830 - DNA, 40 bp, synthetic construct
  misc_feature 1..40: note = Synthetic
  source 1..40: mol_type = other DNA
tggggcccagactgagcacgctttgatggcagaggaaagg

SEQ ID NO: 831 - DNA, 40 bp, synthetic construct
  misc_feature 1..40: note = Synthetic
  source 1..40: mol_type = other DNA
tggggcccagactgagcacgcttttgatggcagaggaaag

SEQ ID NO: 832 - DNA, 39 bp, synthetic construct
  misc_feature 1..39: note = Synthetic
  source 1..39: mol_type = other DNA
tggggcccagactgagcactgatggcagaggaaaggaag

SEQ ID NO: 833 - DNA, 38 bp, synthetic construct
  misc_feature 1..38: note = Synthetic
  source 1..38: mol_type = other DNA
tggggcccagactgagcatgatggcagaggaaaggaag

SEQ ID NO: 834 - DNA, 38 bp, synthetic construct
  misc_feature 1..38: note = Synthetic
  source 1..38: mol_type = other DNA
tggggcccagactgagcacgatggcagaggaaaggaag

SEQ ID NO: 835 - DNA, 40 bp, synthetic construct
  misc_feature 1..40: note = Synthetic
  source 1..40: mol_type = other DNA
tggggcccagactgagcacggtgatggcagaggaaaggaa

SEQ ID NO: 836 - DNA, 39 bp, synthetic construct
  misc_feature 1..39: note = Synthetic
  source 1..39: mol_type = other DNA
tggggcccagactgagcacggatggcagaggaaaggaag

SEQ ID NO: 837 - DNA, 40 bp, synthetic construct
  misc_feature 1..40: note = Synthetic
  source 1..40: mol_type = other DNA
tggggcccagactgagcacgttgatggcagaggaaaggaa

SEQ ID NO: 838 - DNA, 32 bp, synthetic construct
  misc_feature 1..32: note = Synthetic
  source 1..32: mol_type = other DNA
tggggcccagactgatggcagaggaaaggaag

SEQ ID NO: 839 - DNA, 40 bp, synthetic construct
  misc_feature 1..40: note = Synthetic
  source 1..40: mol_type = other DNA
tggggcccagactgagcacgatgatggcagaggaaaggaa

SEQ ID NO: 840 - DNA, 34 bp, synthetic construct
  misc_feature 1..34: note = Synthetic
  source 1..34: mol_type = other DNA
tggggcccagactgagcacgcagaggaaaggaag

SEQ ID NO: 841 - DNA, 26 bp, synthetic construct
  misc_feature 1..26: note = Synthetic
  source 1..26: mol_type = other DNA
tggggctgatggcagaggaaaggaag

SEQ ID NO: 842 - DNA, 30 bp, synthetic construct
  misc_feature 1..30: note = Synthetic
  source 1..30: mol_type = other DNA
tggggcccagactgagcagaggaaaggaag

SEQ ID NO: 843 - DNA, 40 bp, synthetic construct
  misc_feature 1..40: note = Synthetic
  source 1..40: mol_type = other DNA
tggggcccagactgagcacgctgatggcagaggaaaggaa

SEQ ID NO: 844 - DNA, 27 bp, synthetic construct
  misc_feature 1..27: note = Synthetic
  source 1..27: mol_type = other DNA
tggggcctgatggcagaggaaaggaag

SEQ ID NO: 845 - DNA, 25 bp, synthetic construct
  misc_feature 1..25: note = Synthetic
  source 1..25: mol_type = other DNA
tggggtgatggcagaggaaaggaag

SEQ ID NO: 846 - DNA, 31 bp, synthetic construct
  misc_feature 1..31: note = Synthetic
  source 1..31: mol_type = other DNA
tggggcccagactgagcacgaggaaaggaag

SEQ ID NO: 847 - DNA, 33 bp, synthetic construct
  misc_feature 1..33: note = Synthetic
  source 1..33: mol_type = other DNA
tggggcccagactgagcacgagaggaaaggaag

SEQ ID NO: 848 - DNA, 36 bp, synthetic construct
  misc_feature 1..36: note = Synthetic
  source 1..36: mol_type = other DNA
tggggcccagactgagcacgggcagaggaaaggaag

SEQ ID NO: 849 - DNA, 25 bp, synthetic construct
  misc_feature 1..25: note = Synthetic
  source 1..25: mol_type = other DNA
tggggcccagactgaggaaaggaag

SEQ ID NO: 850 - DNA, 19 bp, synthetic construct
  misc_feature 1..19: note = Synthetic
  source 1..19: mol_type = other DNA
tggggcagaggaaaggaag

SEQ ID NO: 851 - DNA, 29 bp, synthetic construct
  misc_feature 1..29: note = Synthetic
  source 1..29: mol_type = other DNA
tggggcccagactgagcacggaaaggaag

SEQ ID NO: 852 - DNA, 28 bp, synthetic construct
  misc_feature 1..28: note = Synthetic
  source 1..28: mol_type = other DNA
tggggcccagatggcagaggaaaggaag

SEQ ID NO: 853 - DNA, 28 bp, synthetic construct
  misc_feature 1..28: note = Synthetic
  source 1..28: mol_type = other DNA
tggggcccagactgagcacgaaaggaag

SEQ ID NO: 854 - DNA, 21 bp, synthetic construct
  misc_feature 1..21: note = Synthetic
  source 1..21: mol_type = other DNA
tggatggcagaggaaaggaag

SEQ ID NO: 855 - DNA, 39 bp, synthetic construct
  misc_feature 1..39: note = Synthetic
  source 1..39: mol_type = other DNA
tggggcccagactgagctttgatggcagaggaaaggaag

SEQ ID NO: 856 - DNA, 23 bp, synthetic construct
  misc_feature 1..23: note = Synthetic
  source 1..23: mol_type = other DNA
tggggcccagactgagcacgaag

SEQ ID NO: 857 - DNA, 32 bp, synthetic construct
  misc_feature 1..32: note = Synthetic
  source 1..32: mol_type = other DNA
tggggcccagactgagcacggaggaaaggaag

SEQ ID NO: 858 - DNA, 24 bp, synthetic construct
  misc_feature 1..24: note = Synthetic
  source 1..24: mol_type = other DNA
tggggcccagactgagcacggaag

SEQ ID NO: 859 - DNA, 21 bp, synthetic construct
  misc_feature 1..21: note = Synthetic
  source 1..21: mol_type = other DNA
tggggcccagaggaaaggaag

SEQ ID NO: 860 - DNA, 30 bp, synthetic construct
  misc_feature 1..30: note = Synthetic
  source 1..30: mol_type = other DNA
tggggcccagtgatggcagaggaaaggaag

SEQ ID NO: 861 - DNA, 23 bp, synthetic construct
  misc_feature 1..23: note = Synthetic
  source 1..23: mol_type = other DNA
tggtgatggcagaggaaaggaag

SEQ ID NO: 862 - DNA, 40 bp, synthetic construct
  misc_feature 1..40: note = Synthetic
  source 1..40: mol_type = other DNA
tggggcccagactgagcacgtgtgatggcagaggaaagga

SEQ ID NO: 863 - DNA, 18 bp, synthetic construct
  misc_feature 1..18: note = Synthetic
  source 1..18: mol_type = other DNA
atggcagaggaaaggaag

SEQ ID NO: 864 - DNA, 34 bp, synthetic construct
  misc_feature 1..34: note = Synthetic
  source 1..34: mol_type = other DNA
tggggcccagactgtgatggcagaggaaaggaag

SEQ ID NO: 865 - DNA, 36 bp, synthetic construct
  misc_feature 1..36: note = Synthetic
  source 1..36: mol_type = other DNA
tggggcccagactgagtgatggcagaggaaaggaag

SEQ ID NO: 866 - DNA, 28 bp, synthetic construct
  misc_feature 1..28: note = Synthetic
  source 1..28: mol_type = other DNA
tggggccctgatggcagaggaaaggaag

SEQ ID NO: 867 - DNA, 35 bp, synthetic construct
  misc_feature 1..35: note = Synthetic
  source 1..35: mol_type = other DNA
tggggcccagactgagcacggcagaggaaaggaag

SEQ ID NO: 868 - DNA, 40 bp, synthetic construct
  misc_feature 1..40: note = Synthetic
  source 1..40: mol_type = other DNA
cctgaaccgtatatcctatggccctgactggaaggatttc

SEQ ID NO: 869 - DNA, 40 bp, synthetic construct
  misc_feature 1..40: note = Synthetic
  source 1..40: mol_type = other DNA
aaccgtatatctatcctatggccctgactggaaggatttc

SEQ ID NO: 870 - DNA, 40 bp, synthetic construct
  misc_feature 1..40: note = Synthetic
  source 1..40: mol_type = other DNA
aaccgtatatctatcctattgccctgactggaaggatttc

SEQ ID NO: 871 - DNA, 40 bp, synthetic construct
  misc_feature 1..40: note = Synthetic
  source 1..40: mol_type = other DNA
aaccgtatatctatcctatgtccctgactggaaggatttc

SEQ ID NO: 872 - DNA, 40 bp, synthetic construct
  misc_feature 1..40: note = Synthetic
  source 1..40: mol_type = other DNA
aaccgtatatctatcctatggccctgactggaaggctttc

SEQ ID NO: 873 - DNA, 40 bp, synthetic construct
  misc_feature 1..40: note = Synthetic
  source 1..40: mol_type = other DNA
aaccgtatatctatcctctggccctgactggaaggatttc

SEQ ID NO: 874 - DNA, 40 bp, synthetic construct
  misc_feature 1..40: note = Synthetic
  source 1..40: mol_type = other DNA
aaccgtatatctatcctctggccctgactggaaggctttc

SEQ ID NO: 875 - DNA, 40 bp, synthetic construct
  misc_feature 1..40: note = Synthetic
  source 1..40: mol_type = other DNA
caccatggtgcacctgactcctgaggagaagtctgccgtt

SEQ ID NO: 876 - DNA, 40 bp, synthetic construct
  misc_feature 1..40: note = Synthetic
  source 1..40: mol_type = other DNA
caccatggtgcacctgactcctgtggagaagtctgccgtt

SEQ ID NO: 877 - DNA, 40 bp, synthetic construct
  misc_feature 1..40: note = Synthetic
  source 1..40: mol_type = other DNA
caccatggcgcacctgactcctgtggagaagtctgccgtt

SEQ ID NO: 878 - DNA, 40 bp, synthetic construct
  misc_feature 1..40: note = Synthetic
  source 1..40: mol_type = other DNA
caccatggtgcacctgactcctgtggagaagtctgtcgtt

SEQ ID NO: 879-880 - skipped (2 entries)

SEQ ID NO: 881 - DNA, 67 bp, synthetic construct
  misc_feature 1..67: note = Synthetic
  source 1..67: mol_type = other DNA
agagctagaaatagcaagttaaaataaggctagtccgttatcaacttgaaaaagtggcaccgagtcg

SEQ ID NO: 882 - DNA, 67 bp, synthetic construct
  misc_feature 1..67: note = Synthetic
  source 1..67: mol_type = other DNA
gcaccgactcggtgccactttttcaagttgataacggactagccttattttaacttgctatttctag

SEQ ID NO: 883-884 - skipped (2 entries)

SEQ ID NO: 885 - DNA, 104 bp, synthetic construct
  misc_feature 1..104: note = Synthetic
  source 1..104: mol_type = other DNA
cagaggaccgactcggtcccactttttcaagttgataacggactagccttattttaacttgctatttctagctctaaaactcacgtgctcagtctgggccggtg

SEQ ID NO: 886 - DNA, 105 bp, synthetic construct
  misc_feature 1..105: note = Synthetic
  source 1..105: mol_type = other DNA
atcacgcaccgactcggtgccactttttcaagttgataacggactagccttattttaacttgctatttctagctctaaaacttcttcttctgctcggactcggtg

SEQ ID NO: 887 - DNA, 105 bp, synthetic construct
  misc_feature 1..105: note = Synthetic
  source 1..105: mol_type = other DNA
tttccgcaccgactcggtgccactttttcaagttgataacggactagccttattttaacttgctatttctagctctaaaacggtgctgcagaagggattccggtg

SEQ ID NO: 888 - DNA, 105 bp, synthetic construct
  misc_feature 1..105: note = Synthetic
  source 1..105: mol_type = other DNA
tcgttgcaccgactcggtgccactttttcaagttgataacggactagccttattttaacttgctatttctagctctaaaaccaggtaatgactaagatgacggtg

SEQ ID NO: 889 - DNA, 75 bp, synthetic construct
  misc_feature 1..75: note = Synthetic
  source 1..75: mol_type = other DNA
tccttggggcccagactgagcacgtgatggcagaggaaaggaagccctgcttcctccagagggcgtcgcaggaca

SEQ ID NO: 890 - protein, 24 aa, synthetic construct
  REGION 1..24: note = Synthetic
SLGPRLSTWQRKGSPASSRGRRRT

SEQ ID NO: 891 - DNA, 75 bp, synthetic construct
  misc_feature 1..75: note = Synthetic
  source 1..75: mol_type = other DNA
tgtcctgcgacgccctctggaggaagcagggcttcctttcctctgccatcacgtgctcagtctgggccccaagga

SEQ ID NO: 892 - DNA, 201 bp, synthetic construct
  misc_feature 1..201: note = Synthetic
  source 1..201: mol_type = other DNA
tattattactctatgttctatttaagttttcatgttctaaaaatgtatcccagtttacacgtctcatatgccccttggcagtcatcttagtcattacctgaggtgttcgttgtaactcatataaactgagttcccatgttttgcttaatggttgagttccgtttgtctgcacagcctgagacattgctggaaataaagaag

SEQ ID NO: 893 - DNA, 201 bp, synthetic construct
  misc_feature 1..201: note = Synthetic
  source 1..201: mol_type = other DNA
cttctttatttccagcaatgtctcaggctgtgcagacaaacggaactcaaccattaagcaaaacatgggaactcagtttatatgagttacaacgaacacctcaggtaatgactaagatgactgccaaggggcatatgagacgtgtaaactgggatacatttttagaacatgaaaacttaaatagaacatagagtaataata

SEQ ID NO: 894 - DNA, 20 bp, synthetic construct
  misc_feature 1..20: note = Synthetic
  source 1..20: mol_type = other DNA
gtcatcttagtcattacctg

SEQ ID NO: 895 - DNA, 29 bp, synthetic construct
  misc_feature 1..29: note = Synthetic
  source 1..29: mol_type = other DNA
aacgaacaccgcaggtaatgactaagatg

SEQ ID NO: 896 - DNA, 76 bp, synthetic construct; identical to SEQ ID NO: 131
  misc_feature 1..76: note = Synthetic
  source 1..76: mol_type = other DNA

SEQ ID NO: 897 - RNA, 126 nt, synthetic construct
  misc_feature 1..126: note = Synthetic
  misc_feature 99..123: note = n is a, c, g, or u
  source 1..126: mol_type = other RNA
gaaggcaataatgctaattacagttttagagctagaaatagcaagttaaaataaggctagtccgttatcaacttgaaaaagtggcaccgagtaggtgcnnnnnnnnnnnnnnnnnnnnnnnnnttt

SEQ ID NO: 898 - RNA, 135 nt, synthetic construct
  misc_feature 1..135: note = Synthetic
  misc_feature 99..123: note = n is a, c, g, or u
  misc_feature 128..132: note = n is a, c, g, or u
  source 1..135: mol_type = other RNA
gaaggcaataatgctaattacagttttagagctagaaatagcaagttaaaataaggctagtccgttatcaacttgaaaaagtggcaccgagtaggtgcnnnnnnnnnnnnnnnnnnnnnnnnngaaannnnnttt

SEQ ID NO: 899 - protein, 18 aa, synthetic construct
  REGION 1..18: note = Synthetic
AACAGNRVRRSVGSSLKC

SEQ ID NO: 900 - protein, 15 aa, synthetic construct
  REGION 1..15: note = Synthetic
AADHCPVVEVNGVTI

SEQ ID NO: 901 - protein, 13 aa, synthetic construct
  REGION 1..13: note = Synthetic
AAHLPTGTPLDID

SEQ ID NO: 902 - protein, 12 aa, synthetic construct
  REGION 1..12: note = Synthetic
AALAVWAGLAVQ

SEQ ID NO: 903 - protein, 15 aa, synthetic construct
  REGION 1..15: note = Synthetic
AALGVATAAQITAGI

SEQ ID NO: 904 - protein, 24 aa, synthetic construct
  REGION 1..24: note = Synthetic
AALLNTPPPYQVSCGGESDRATAR

SEQ ID NO: 905 - protein, 15 aa, synthetic construct
  REGION 1..15: note = Synthetic
AAQSFTGVVYGTHTT

SEQ ID NO: 906 - protein, 15 aa, synthetic construct
  REGION 1..15: note = Synthetic
ACEVEPAFGHSDAAC

SEQ ID NO: 907 - protein, 15 aa, synthetic construct
  REGION 1..15: note = Synthetic
ACTFWAVNAYSSGGY

SEQ ID NO: 908 - protein, 7 aa, synthetic construct
  REGION 1..7: note = Synthetic
ADDPLLR

SEQ ID NO: 909 - protein, 8 aa, synthetic construct
  REGION 1..8: note = Synthetic
ADDPLLRT

SEQ ID NO: 910 - protein, 15 aa, synthetic construct
  REGION 1..15: note = Synthetic
AEMICDIDTYIVEAG

SEQ ID NO: 911 - protein, 20 aa, synthetic construct
  REGION 1..20: note = Synthetic
AEMICDIDTYIVEAGLASFI

SEQ ID NO: 912 - protein, 7 aa, synthetic construct
  REGION 1..7: note = Synthetic
AEPLLSC

SEQ ID NO: 913 - protein, 15 aa, synthetic construct
  REGION 1..15: note = Synthetic
AFVSTSSSRRYTEVY

SEQ ID NO: 914 - protein, 31 aa, synthetic construct
  REGION 1..31: note = Synthetic
AGFIYRETFCITTIYKTGQPAADHYYSKVTA

SEQ ID NO: 915 - protein, 15 aa, synthetic construct
  REGION 1..15: note = Synthetic
AGLLACCAKCLYYLR

SEQ ID NO: 916 - protein, 12 aa, synthetic construct
  REGION 1..12: note = Synthetic
AHTTSDPWHPPG

SEQ ID NO: 917 - protein, 15 aa, synthetic construct
  REGION 1..15: note = Synthetic
AIAKLEDAKELLESS

SEQ ID NO: 918 - protein, 15 aa, synthetic construct
  REGION 1..15: note = Synthetic
AIDNLRASLETTNQA

SEQ ID NO: 919 - protein, 7 aa, synthetic construct
  REGION 1..7: note = Synthetic
AKGVEFR

SEQ ID NO: 920 - protein, 15 aa, synthetic construct
  REGION 1..15: note = Synthetic
AKWAVPTTRTDDKLR

SEQ ID NO: 921 - protein, 10 aa, synthetic construct
  REGION 1..10: note = Synthetic
ALAEVLKKPV

SEQ ID NO: 922 - protein, 15 aa, synthetic construct
  REGION 1..15: note = Synthetic
ALGVINTLEWIPRFK

SEQ ID NO: 923 - protein, 15 aa, synthetic construct
  REGION 1..15: note = Synthetic
ALHQSMLNSQAIDNL

SEQ ID NO: 924 - protein, 10 aa, synthetic construct
  REGION 1..10: note = Synthetic
ALIGILSLFV

SEQ ID NO: 925 - protein, 20 aa, synthetic construct
  REGION 1..20: note = Synthetic
ALLNTPPPYQVSCGGESDRA

SEQ ID NO: 926 - protein, 24 aa, synthetic construct
  REGION 1..24: note = Synthetic
ALLNTPPPYQVSCGGESDRASARV

SEQ ID NO: 927 - protein, 15 aa, synthetic construct
  REGION 1..15: note = Synthetic
ALVEGLAPGGGNCHL

SEQ ID NO: 928 - protein, 12 aa, synthetic construct
  REGION 1..12: note = Synthetic
AMAAWSERAGEA

SEQ ID NO: 929 - protein, 15 aa, synthetic construct
  REGION 1..15: note = Synthetic
ANCASILCKCYTTGT

SEQ ID NO: 930 - protein, 12 aa, synthetic construct
  REGION 1..12: note = Synthetic
ANPNPYTSRRSV

SEQ ID NO: 931 - protein, 8 aa, synthetic construct
  REGION 1..8: note = Synthetic
APGPGEVW

SEQ ID NO: 932 - protein, 23 aa, synthetic construct
  REGION 1..23: note = Synthetic
APLPPHTTERIETRSARHPWRIR

SEQ ID NO: 933 - protein, 27 aa, synthetic construct
  REGION 1..27: note = Synthetic
APPMPPQPPRAHGQHYGHHHHQLPFLG

SEQ ID NO: 934 - protein, 27 aa, synthetic construct
  REGION 1..27: note = Synthetic
APPTLPQPPCAHGQHYGHHHHQLPFLG

SEQ ID NO: 935 - protein, 27 aa, synthetic construct
  REGION 1..27: note = Synthetic
APPTLPQPPRAHGQHYGHHHHQLPFLG

SEQ ID NO: 936 - protein, 22 aa, synthetic construct
  REGION 1..22: note = Synthetic
APQPGPQPPQPPQPQPEAPAPQ

SEQ ID NO: 937 - protein, 15 aa, synthetic construct
  REGION 1..15: note = Synthetic
AQLASYFNPGGSYYK

SEQ ID NO: 938 - protein, 13 aa, synthetic construct
  REGION 1..13: note = Synthetic
ARAAHLPTGTPLD

SEQ ID NO: 939 - protein, 15 aa, synthetic construct
  REGION 1..15: note = Synthetic
ARLVSEIAMHTTEDK

SEQ ID NO: 940 - protein, 20 aa, synthetic construct
  REGION 1..20: note = Synthetic
ARLVSEIAMHTTEDKISRAV

SEQ ID NO: 941 - protein, 17 aa, synthetic construct
  REGION 1..17: note = Synthetic
ASDVETAEGGEIHELLR

SEQ ID NO: 942 - protein, 19 aa, synthetic construct
  REGION 1..19: note = Synthetic
ASDVETAEGGEIHELLRLQ

SEQ ID NO: 943 - protein, 21 aa, synthetic construct
  REGION 1..21: note = Synthetic
ASDVETAEGGEIHELLRLQSR

SEQ ID NO: 944 - protein, 19 aa, synthetic construct
  REGION 1..19: note = Synthetic
ASDVETAEGGEIHKLLRLQ

SEQ ID NO: 945 - protein, 12 aa, synthetic construct
  REGION 1..12: note = Synthetic
ASDVLPGHWLQG

SEQ ID NO: 946 - protein, 15 aa, synthetic construct
  REGION 1..15: note = Synthetic
ASELGITAEDARLVS

SEQ ID NO: 947 - protein, 20 aa, synthetic construct
  REGION 1..20: note = Synthetic
ASELGITAEDARLVSEIAMH

SEQ ID NO: 948 - protein, 13 aa, synthetic construct
  REGION 1..13: note = Synthetic
ASESSQDPQDSRR

SEQ ID NO: 949 - protein, 15 aa, synthetic construct
  REGION 1..15: note = Synthetic
ASILCKCYTTGTIIN

SEQ ID NO: 950 - protein, 15 aa, synthetic construct
  REGION 1..15: note = Synthetic
ASPVCQRHSPDCSRL

SEQ ID NO: 951 - protein, 12 aa, synthetic construct
  REGION 1..12: note = Synthetic
ASQARWTGATRA

SEQ ID NO: 952 - protein, 28 aa, synthetic construct
  REGION 1..28: note = Synthetic
ASYFNPGGSYYKQYHPTACEVEPAFGHS

SEQ ID NO: 953 - protein, 15 aa, synthetic construct
  REGION 1..15: note = Synthetic
ASYKVMTRSSHQSLV

SEQ ID NO: 954 - protein, 12 aa, synthetic construct
  REGION 1..12: note = Synthetic
ASYVKKPKEDVD

SEQ ID NO: 955 - protein, 15 aa, synthetic construct
  REGION 1..15: note = Synthetic
ATAAQITAGIALHQS

SEQ ID NO: 956 - protein, 8 aa, synthetic construct
  REGION 1..8: note = Synthetic
ATPERPRL

SEQ ID NO: 957 - protein, 15 aa, synthetic construct
  REGION 1..15: note = Synthetic
AVCLGGLIGIPALIC

SEQ ID NO: 958 - protein, 11 aa, synthetic construct
  REGION 1..11: note = Synthetic
AVGPRQAQVSF

SEQ ID NO: 959 - protein, 15 aa, synthetic construct
  REGION 1..15: note = Synthetic
AVNAYSSGGYAQLAS

SEQ ID NO: 960 - protein, 15 aa, synthetic construct
  REGION 1..15: note = Synthetic
AVSETRQTWAEWAAA

SEQ ID NO: 961 - protein, 15 aa, synthetic construct
  REGION 1..15: note = Synthetic
AVTAPDTAADSELRR

SEQ ID NO: 962 - protein, 20 aa, synthetic construct
  REGION 1..20: note = Synthetic
AVTAPDTAADSELRRWIKYT

SEQ ID NO: 963 - protein, 22 aa, synthetic construct
  REGION 1..22: note = Synthetic
AYGGIIKDAPPGAGFIYRETFC

SEQ ID NO: 964 - protein, 15 aa, synthetic construct
  REGION 1..15: note = Synthetic
CALPLAGLLACCAKC

SEQ ID NO: 965 - protein, 15 aa, synthetic construct
  REGION 1..15: note = Synthetic
CARIWNGTQRACTFW

SEQ ID NO: 966 - protein, 15 aa, synthetic construct
  REGION 1..15: note = Synthetic
CARTLVSGSFGNRFI

SEQ ID NO: 967 - protein, 22 aa, synthetic construct
  REGION 1..22: note = Synthetic
CASPYEGRYRDMYDALRBRLLY

SEQ ID NO: 968 - protein, 14 aa, synthetic construct
  REGION 1..14: note = Synthetic
CAVFVRSGQPVIGA

SEQ ID NO: 969 - protein, 16 aa, synthetic construct
  REGION 1..16: note = Synthetic
CCAKCLYYLRGAIAPR

SEQ ID NO: 970 - protein, 15 aa, synthetic construct
  REGION 1..15: note = Synthetic
CCRGRCNKKGEQVGM

SEQ ID NO: 971 - protein, 15 aa, synthetic construct
  REGION 1..15: note = Synthetic
CEIPTDVSCEGLGAW

SEQ ID NO: 972 - protein, 16 aa, synthetic construct
  REGION 1..16: note = Synthetic
CFGKDLKRPGSSPMEV

SEQ ID NO: 973 - protein, 15 aa, synthetic construct
  REGION 1..15: note = Synthetic
CFQQACKGKIQALCE

SEQ ID NO: 974 - protein, 29 aa, synthetic construct
  REGION 1..29: note = Synthetic
CFQQACKGKIQALCENPEWAPLKDNRIPS

SEQ ID NO: 975 - protein, 15 aa, synthetic construct
  REGION 1..15: note = Synthetic
CGGESDRASARVIDP

SEQ ID NO: 976 - protein, 22 aa, synthetic construct
  REGION 1..22: note = Synthetic
CITTIYKTGQPAADHYYSKVTA

SEQ ID NO: 977 - protein, 15 aa, synthetic construct
  REGION 1..15: note = Synthetic
CKGKIQALCENPEWA

SEQ ID NO: 978 - protein, 13 aa, synthetic construct
  REGION 1..13: note = Synthetic
CKPWQESRKNKAQ

SEQ ID NO: 979 - protein, 15 aa, synthetic construct
  REGION 1..15: note = Synthetic
CNKKGEQVGMSRPGL

SEQ ID NO: 980 - protein, 15 aa, synthetic construct
  REGION 1..15: note = Synthetic
CNVTTEHPFCNTPHG

SEQ ID NO: 981 - protein, 10 aa, synthetic construct
  REGION 1..10: note = Synthetic
CQVGSSNSAF

SEQ ID NO: 982 - protein, 12 aa, synthetic construct
  REGION 1..12: note = Synthetic
CSGPTTIRGQFS

SEQ ID NO: 983 - protein, 16 aa, synthetic construct
  REGION 1..16: note = Synthetic
CTSPYDGKYWSMYSRL

SEQ ID NO: 984 - protein, 15 aa, synthetic construct
  REGION 1..15: note = Synthetic
CVLADSESGGHITHS

SEQ ID NO: 985 - protein, 24 aa, synthetic construct
  REGION 1..24: note = Synthetic
CYTTGTIINQDPDKILTYIAADHC

SEQ ID NO: 986 - protein, 8 aa, synthetic construct
  REGION 1..8: note = Synthetic
DADDPLLR

SEQ ID NO: 987 - protein, 15 aa, synthetic construct
  REGION 1..15: note = Synthetic
DARAAHLPTGTPLDI

SEQ ID NO: 988 - protein, 20 aa, synthetic construct
  REGION 1..20: note = Synthetic
DARAAHLPTGTPLDIDTASE

SEQ ID NO: 989 - protein, 15 aa, synthetic construct
  REGION 1..15: note = Synthetic
DCHAPTYLPAEVDGD

SEQ ID NO: 990 - protein, 15 aa, synthetic construct
  REGION 1..15: note = Synthetic
DCSRLVGATPERPRL

SEQ ID NO: 991 - protein, 15 aa, synthetic construct
  REGION 1..15: note = Synthetic
DDKLRMETCFQQACK

SEQ ID NO: 992 - protein, 8 aa, synthetic construct
  REGION 1..8: note = Synthetic
DDPLLRTA

SEQ ID NO: 993 - protein, 15 aa, synthetic construct
  REGION 1..15: note = Synthetic
DDPLLRTAPGPGEVW

SEQ ID NO: 994 - protein, 11 aa, synthetic construct
  REGION 1..11: note = Synthetic
DDPPATVYRYD

SEQ ID NO: 995 - protein, 17 aa, synthetic construct
  REGION 1..17: note = Synthetic
DDPPATVYRYDSRPPED

SEQ ID NO: 996 - protein, 18 aa, synthetic construct
  REGION 1..18: note = Synthetic
DDPPATVYRYDSRPPEDV

SEQ ID NO: 997 - protein, 15 aa, synthetic construct
  REGION 1..15: note = Synthetic
DEVGLRTPQRFTDLV

SEQ ID NO: 998 - protein, 15 aa, synthetic construct
  REGION 1..15: note = Synthetic
DHCPVVEVNGVTIQV

SEQ ID NO: 999 - protein, 13 aa, synthetic construct
  REGION 1..13: note = Synthetic
DIDTASESSQDPQ

SEQ ID NO: 1000 - protein, 15 aa, synthetic construct
  REGION 1..15: note = Synthetic
DINKVLEKLGYSGGD

SEQ ID NO: 1001 - protein, 7 aa, synthetic construct
  REGION 1..7: note = Synthetic
DLIAYKQ

SEQ ID NO: 1002 - protein, 15 aa, synthetic construct
  REGION 1..15: note = Synthetic
DLIGQKLGLKLLRYY

SEQ ID NO: 1003 - protein, 19 aa, synthetic construct
  REGION 1..19: note = Synthetic
DLQKALEAQSRALRAELAA

SEQ ID NO: 1004 - protein, 15 aa, synthetic construct
  REGION 1..15: note = Synthetic
DLQYVLATYDTSRVE

SEQ ID NO: 1005 - protein, 9 aa, synthetic construct
  REGION 1..9: note = Synthetic
DLSLRRFMV

SEQ ID NO: 1006 - protein, 15 aa, synthetic construct
  REGION 1..15: note = Synthetic
DLSNCMVALGELKLA

SEQ ID NO: 1007 - protein, 24 aa, synthetic construct
  REGION 1..24: note = Synthetic
DLVEYIMNYTGNQQSRWGLGSPNC

SEQ ID NO: 1008 - protein, 15 aa, synthetic construct
  REGION 1..15: note = Synthetic
DLVKFISDKIKFLNP

SEQ ID NO: 1009 - protein, 15 aa, synthetic construct
  REGION 1..15: note = Synthetic
DLVKFISTKIKFLNP

SEQ ID NO: 1010 - protein, 10 aa, synthetic construct
  REGION 1..10: note = Synthetic
DLYKSNHNNV

SEQ ID NO: 1011 - protein, 10 aa, synthetic construct
  REGION 1..10: note = Synthetic
DNVLDHLTGR

SEQ ID NO: 1012 - protein, 12 aa, synthetic construct
  REGION 1..12: note = Synthetic
DNVLDHLTGRSC

SEQ ID NO: 1013 - protein, 13 aa, synthetic construct
  REGION 1..13: note = Synthetic
DNVLDHLTGRSCQ

SEQ ID NO: 1014 - protein, 11 aa, synthetic construct
  REGION 1..11: note = Synthetic
DPDKILTYIAA

SEQ ID NO: 1015 - protein, 19 aa, synthetic construct
  REGION 1..19: note = Synthetic
DPGDLVEYIMNYTGNQQSR

SEQ ID NO: 1016 - protein, 8 aa, synthetic construct
  REGION 1..8: note = Synthetic
DPLLRTAP

SEQ ID NO: 1017 - protein, 22 aa, synthetic construct
  REGION 1..22: note = Synthetic
DPLLRTAPGPGEVWVTPVIGSQ

SEQ ID NO: 1018 - protein, 13 aa, synthetic construct
  REGION 1..13: note = Synthetic
DPQDSRRSAEPLL

SEQ ID NO: 1019 - protein, 15 aa, synthetic construct
  REGION 1..15: note = Synthetic
DPVIDRLYLSSHRGV

SEQ ID NO: 1020 - protein, 15 aa, synthetic construct
  REGION 1..15: note = Synthetic
DQILRSMKGLSSTSI

SEQ ID NO: 1021 - protein, 15 aa, synthetic construct
  REGION 1..15: note = Synthetic
DQYCADVAAEELMNA

SEQ ID NO: 1022 - protein, 10 aa, synthetic construct
  REGION 1..10: note = Synthetic
DSESGGHITH

SEQ ID NO: 1023 - protein, 13 aa, synthetic construct
  REGION 1..13: note = Synthetic
DTASESSQDPQDS

SEQ ID NO: 1024 - protein, 15 aa, synthetic construct
  REGION 1..15: note = Synthetic
DTVMSVFALASYVQH

SEQ ID NO: 1025 - protein, 14 aa, synthetic construct
  REGION 1..14: note = Synthetic
DVFQNGFTAWGNND

SEQ ID NO: 1026 - protein, 15 aa, synthetic construct
  REGION 1..15: note = Synthetic
DVGAVPPGKFVTAAL

SEQ ID NO: 1027 - protein, 16 aa, synthetic construct
  REGION 1..16: note = Synthetic
DVNKSKTHISVNGRKI

SEQ ID NO: 1028 - protein, 15 aa, synthetic construct
  REGION 1..15: note = Synthetic
DVSCEGLGAWVPAAP

SEQ ID NO: 1029 - protein, 27 aa, synthetic construct
  REGION 1..27: note = Synthetic
DWASPVCQRHSPDCSRLVGATPERPRL

SEQ ID NO: 1030 - protein, 13 aa, synthetic construct
  REGION 1..13: note = Synthetic
EARESYRETGPSR

SEQ ID NO: 1031 - protein, 13 aa, synthetic construct
  REGION 1..13: note = Synthetic
EAVEAERAGRGTG

SEQ ID NO: 1032 - protein, 15 aa, synthetic construct
  REGION 1..15: note = Synthetic
EDAKELLESSDQILR

SEQ ID NO: 1033 - protein, 13 aa, synthetic construct
  REGION 1..13: note = Synthetic
EDRRVKQSRGEAR

SEQ ID NO: 1034 - protein, 15 aa, synthetic construct
  REGION 1..15: note = Synthetic
EDSITIPYQGSGKGV

SEQ ID NO: 1035 - protein, 15 aa, synthetic construct
  REGION 1..15: note = Synthetic
EEAFTYLCTAPGCAT

SEQ ID NO: 1036 - protein, 15 aa, synthetic construct
  REGION 1..15: note = Synthetic
EGFNMILGTILAQIW

SEQ ID NO: 1037 - protein, 20 aa, synthetic construct
  REGION 1..20: note = Synthetic
EGFNMILGTILAQIWVLLAK

SEQ ID NO: 1038 - protein, 15 aa, synthetic construct
  REGION 1..15: note = Synthetic
EHPFCNTPHGQLEVQ

SEQ ID NO: 1039 - protein, 15 aa, synthetic construct
  REGION 1..15: note = Synthetic
EISDIEVQDPEGFNM

SEQ ID NO: 1040 - protein, 20 aa, synthetic construct
  REGION 1..20: note = Synthetic
EISDIEVQDPEGFNMILGTI

SEQ ID NO: 1041 - protein, 11 aa, synthetic construct
  REGION 1..11: note = Synthetic
EKPNLSSKRSE

SEQ ID NO: 1042 - protein, 15 aa, synthetic construct
  REGION 1..15: note = Synthetic
ELKLAALCHGEDSIT

SEQ ID NO: 1043 - protein, 15 aa, synthetic construct
  REGION 1..15: note = Synthetic
ELMNALVNSTLLETR

SEQ ID NO: 1044 - protein, 5 aa, synthetic construct
  REGION 1..5: note = Synthetic
ELPRL

SEQ ID NO: 1045 - protein, 23 aa, synthetic construct
  REGION 1..23: note = Synthetic
ENPEWAPLKDNRIPSYGVLSVDL

SEQ ID NO: 1046 - protein, 15 aa, synthetic construct
  REGION 1..15: note = Synthetic
EPIRDALNAMTQNIR

SEQ ID NO: 1047 - protein, 15 aa, synthetic construct
  REGION 1..15: note = Synthetic
EQVGMSRPGLKPDLT

SEQ ID NO: 1048 - protein, 8 aa, synthetic construct
  REGION 1..8: note = Synthetic
ERPRLRLV

SEQ ID NO: 1049 - protein, 15 aa, synthetic construct
  REGION 1..15: note = Synthetic
ERPRLRLVDADDPLL

SEQ ID NO: 1050 - protein, 17 aa, synthetic construct
  REGION 1..17: note = Synthetic
ESPGQLIQRITDDPDVS

SEQ ID NO: 1051 - protein, 15 aa, synthetic construct
  REGION 1..15: note = Synthetic
ESRGIKARITHVDTE

SEQ ID NO: 1052 - protein, 15 aa, synthetic construct
  REGION 1..15: note = Synthetic
ESSCTFMPEGTVCSQ

SEQ ID NO: 1053 - protein, 13 aa, synthetic construct
  REGION 1..13: note = Synthetic
ESSQDPQDSRRSA

SEQ ID NO: 1054 - protein, 15 aa, synthetic construct
  REGION 1..15: note = Synthetic
ETRTTNQFLAVSKGN

SEQ ID NO: 1055 - protein, 15 aa, synthetic construct
  REGION 1..15: note = Synthetic
EVDGDVKLSSNLVIL

SEQ ID NO: 1056 - protein, 9 aa, synthetic construct
  REGION 1..9: note = Synthetic
EVNGVTIQV

SEQ ID NO: 1057 - protein, 8 aa, synthetic construct
  REGION 1..8: note = Synthetic
EVWVTPVI

SEQ ID NO: 1058 - protein, 12 aa, synthetic construct
  REGION 1..12: note = Synthetic
EVWVTPVIGSQA

SEQ ID NO: 1059 - protein, 15 aa, synthetic construct
  REGION 1..15: note = Synthetic
EWAAAHWWQLTLGAT

SEQ ID NO: 1060 - protein, 15 aa, synthetic construct
  REGION 1..15: note = Synthetic
EWIPRFKVSPYLFTV

SEQ ID NO: 1061 - protein, 12 aa, synthetic construct
  REGION 1..12: note = Synthetic
FEYVDTYGDNAG

SEQ ID NO: 1062 - protein, 15 aa, synthetic construct
  REGION 1..15: note = Synthetic
FGPLITHGSGMDLYK

SEQ ID NO: 1063 - protein, 9 aa, synthetic construct
  REGION 1..9: note = Synthetic
FIFDALAEV

SEQ ID NO: 1064 - protein, 9 aa, synthetic construct
  REGION 1..9: note = Synthetic
FISDKIKFL

SEQ ID NO: 1065 - protein, 15 aa, synthetic construct
  REGION 1..15: note = Synthetic
FKRNKDKPPITSGSG

SEQ ID NO: 1066 - protein, 20 aa, synthetic construct
  REGION 1..20: note = Synthetic
FKRNKDKPPITSGSGGAIRG

SEQ ID NO: 1067 - protein, 15 aa, synthetic construct
  REGION 1..15: note = Synthetic
FKTVRPVALPRTLAP

SEQ ID NO: 1068 - protein, 9 aa, synthetic construct
  REGION 1..9: note = Synthetic
FLMDRHIIV

SEQ ID NO: 1069 - protein, 15 aa, synthetic construct
  REGION 1..15: note = Synthetic
FMAVLLTLQTPTGQI

SEQ ID NO: 1070 - protein, 15 aa, synthetic construct
  REGION 1..15: note = Synthetic
FMPEGTVCSQNALYP

SEQ ID NO: 1071 - protein, 9 aa, synthetic construct
  REGION 1..9: note = Synthetic
FMYMSLLGV

SEQ ID NO: 1072 - protein, 15 aa, synthetic construct
  REGION 1..15: note = Synthetic
FNVPIKEAGEDCHAP

SEQ ID NO: 1073 - protein, 15 aa, synthetic construct
  REGION 1..15: note = Synthetic
FRDLTWCINPPERIK

SEQ ID NO: 1074 - protein, 15 aa, synthetic construct
  REGION 1..15: note = Synthetic
FSHDDPISSDQSRFG

SEQ ID NO: 1075 - protein, 20 aa, synthetic construct
  REGION 1..20: note = Synthetic
FSHDDPISSDQSRFGWFENK

SEQ ID NO: 1076 - protein, 15 aa, synthetic construct
  REGION 1..15: note = Synthetic
FTDLVKFISDKIKFL

SEQ ID NO: 1077 - protein, 15 aa, synthetic construct
  REGION 1..15: note = Synthetic
FTWDQKLWCRHFCVL

SEQ ID NO: 1078 - protein, 32 aa, synthetic construct
  REGION 1..32: note = Synthetic
FVRDGQSVIGACASPYEGRYRDLYDALRRLLY

SEQ ID NO: 1079 - protein, 33 aa, synthetic construct
  REGION 1..33: note = Synthetic
FVRSGQPVIGACTSPYDGKYWSILYSRLRKMLY

SEQ ID NO: 1080 - protein, 15 aa, synthetic construct
  REGION 1..15: note = Synthetic
FYKDNPHPKGSRIVI

SEQ ID NO: 1081 - protein, 14 aa, synthetic construct
  REGION 1..14: note = Synthetic
GAASSYFEYVDTYG

SEQ ID NO: 1082 - protein, 21 aa, synthetic construct
  REGION 1..21: note = Synthetic
GAFDLKTTFCIMTTRNTGQPA

SEQ ID NO: 1083 - protein, 15 aa, synthetic construct
  REGION 1..15: note = Synthetic
GALIGILSLFVESPG

SEQ ID NO: 1084 - protein, 20 aa, synthetic construct
  REGION 1..20: note = Synthetic
GALIGILSLFVESPGQLIQR

SEQ ID NO: 1085 - protein, 8 aa, synthetic construct
  REGION 1..8: note = Synthetic
GATPERPR

SEQ ID NO: 1086 - protein, 24 aa, synthetic construct
  REGION 1..24: note = Synthetic
GAYGRCPNGTRALTVAELRGNAEL

SEQ ID NO: 1087 - protein, 15 aa, synthetic construct
  REGION 1..15: note = Synthetic
GCFAPWDLEATGACI

SEQ ID NO: 1088 - protein, 13 aa, synthetic construct
  REGION 1..13: note = Synthetic
GDINKVLEKLGYS

SEQ ID NO: 1089 - protein, 19 aa, synthetic construct
  REGION 1..19: note = Synthetic
GDINKVLEKLGYSGGDLLG

SEQ ID NO: 1090 - protein, 13 aa, synthetic construct
  REGION 1..13: note = Synthetic
GDLRAVHHRPVPA

SEQ ID NO: 1091 - protein, 15 aa, synthetic construct
  REGION 1..15: note = Synthetic
GDLVEYIMNYTGNQQ

SEQ ID NO: 1092 - protein, 15 aa, synthetic construct
  REGION 1..15: note = Synthetic
GDSSITTRSRLLDRL

SEQ ID NO: 1093 - protein, 20 aa, synthetic construct
  REGION 1..20: note = Synthetic
GDSSITTRSRLLDRLVRLIG

SEQ ID NO: 1094 - protein, 15 aa, synthetic construct
  REGION 1..15: note = Synthetic
GEDCHAPTYLPAEVD

SEQ ID NO: 1095 - protein, 15 aa, synthetic construct
  REGION 1..15: note = Synthetic
GELSTLESLMNLYQQ

SEQ ID NO: 1096 - protein, 20 aa, synthetic construct
  REGION 1..20: note = Synthetic
GELSTLESLMNLYQQMGKPA

SEQ ID NO: 1097 - protein, 12 aa, synthetic construct
  REGION 1..12: note = Synthetic
GEQARYLALLEA

SEQ ID NO: 1098 - protein, 6 aa, synthetic construct
  REGION 1..6: note = Synthetic
GEVWVT

SEQ ID NO: 1099 - protein, 8 aa, synthetic construct
  REGION 1..8: note = Synthetic
GEVWVTPV

SEQ ID NO: 1100 - protein, 14 aa, synthetic construct
  REGION 1..14: note = Synthetic
GEVWVTPVIGSQAR

SEQ ID NO: 1101 - protein, 15 aa, synthetic construct
  REGION 1..15: note = Synthetic
GEYGGVIKDGTPGGA

SEQ ID NO: 1102 - protein, 17 aa, synthetic construct
  REGION 1..17: note = Synthetic
GFLSGVGPMRLRHGADT

SEQ ID NO: 1103 - protein, 22 aa, synthetic construct
  REGION 1..22: note = Synthetic
GFRASDVETAEGGEIHELLRLQ

SEQ ID NO: 1104 - protein, 25 aa, synthetic construct
  REGION 1..25: note = Synthetic
GGAVPGGAVPGGAVPGGFGPGGFGP

SEQ ID NO: 1105 - protein, 25 aa, synthetic construct
  REGION 1..25: note = Synthetic
GGAVPGGAVPGGFGPGGFGPGGFGP

SEQ ID NO: 1106 - protein, 30 aa, synthetic construct
  REGION 1..30: note = Synthetic
GGAVPGGAVPGGFGPGGFGPGGFGPGGFGP

SEQ ID NO: 1107 - protein, 15 aa, synthetic construct
  REGION 1..15: note = Synthetic
GGHITHSGMVGMGVS

SEQ ID NO: 1108 - protein, 20 aa, synthetic construct
  REGION 1..20: note = Synthetic
GILESRGIKARITHVDTESY

SEQ ID NO: 1109 - protein, 17 aa, synthetic construct
  REGION 1..17: note = Synthetic
GITGETTTTEYSNARYV

SEQ ID NO: 1110 - protein, 13 aa, synthetic construct
  REGION 1..13: note = Synthetic
GKEDRRVKQSRGE

SEQ ID NO: 1111 - protein, 7 aa, synthetic construct
  REGION 1..7: note = Synthetic
GKVTNGS

SEQ ID NO: 1112 - protein, 15 aa, synthetic construct
  REGION 1..15: note = Synthetic
GLGAWVPAAPCARIW

SEQ ID NO: 1113 - protein, 15 aa, synthetic construct
  REGION 1..15: note = Synthetic
GLIGIPALICCCRGR

SEQ ID NO: 1114 - protein, 20 aa, synthetic construct
  REGION 1..20: note = Synthetic
GLLACCAKCLYYLRGAIAPR

SEQ ID NO: 1115 - protein, 15 aa, synthetic construct
  REGION 1..15: note = Synthetic
GLLAIAGIRLHRAAI

SEQ ID NO: 1116 - protein, 16 aa, synthetic construct
  REGION 1..16: note = Synthetic
GLQPRADMAAPPTLPQ

SEQ ID NO: 1117 - protein, 17 aa, synthetic construct
  REGION 1..17: note = Synthetic
GMGVSCTVTREDGTNRR

SEQ ID NO: 1118 - protein, 12 aa, synthetic construct
  REGION 1..12: note = Synthetic
GMYGGTYLVEKP

SEQ ID NO: 1119 - protein, 28 aa, synthetic construct
  REGION 1..28: note = Synthetic
GNAELQTYLRQITPGWSIYGLYDGTYLG

SEQ ID NO: 1120 - protein, 15 aa, synthetic construct
  REGION 1..15: note = Synthetic
GNCHLTVNGEDVGAV

SEQ ID NO: 1121 - protein, 13 aa, synthetic construct
  REGION 1..13: note = Synthetic
GNNDNVLDHLTGR

SEQ ID NO: 1122 - protein, 15 aa, synthetic construct
  REGION 1..15: note = Synthetic
GNNDNVLDHLTGRSC

SEQ ID NO: 1123 - protein, 15 aa, synthetic construct
  REGION 1..15: note = Synthetic
GNRFILSQGNLIANC

SEQ ID NO: 1124 - protein, 34 aa, synthetic construct
  REGION 1..34: note = Synthetic
GNRGRGQRRDWSRAPPPPEERQETRSQTPAPKPS

SEQ ID NO: 1125 - protein, 8 aa, synthetic construct
  REGION 1..8: note = Synthetic
GPGEVWVT

SEQ ID NO: 1126 - protein, 17 aa, synthetic construct
  REGION 1..17: note = Synthetic
GPMRLRHGADTRCGRLI

SEQ ID NO: 1127 - protein, 7 aa, synthetic construct
  REGION 1..7: note = Synthetic
GPNHTKV

SEQ ID NO: 1128 - protein, 9 aa, synthetic construct
  REGION 1..9: note = Synthetic
GPRQAQVSF

SEQ ID NO: 1129 - protein, 15 aa, synthetic construct
  REGION 1..15: note = Synthetic
GPRQAQVSFLQGDQS

SEQ ID NO: 1130 - protein, 20 aa, synthetic construct
  REGION 1..20: note = Synthetic
GPRQAQVSFLQGDQSENELP

SEQ ID NO: 1131 - protein, 15 aa, synthetic construct
  REGION 1..15: note = Synthetic
GRGYNVSSIVTMTSQ

SEQ ID NO: 1132 - protein, 7 aa, synthetic construct
  REGION 1..7: note = Synthetic
GRTPFII

SEQ ID NO: 1133 - protein, 15 aa, synthetic construct
  REGION 1..15: note = Synthetic
GSPNCHGPDWASPVC

SEQ ID NO: 1134 - protein, 15 aa, synthetic construct
  REGION 1..15: note = Synthetic
GSQARKCGLHIRAGP

SEQ ID NO: 1135 - protein, 15 aa, synthetic construct
  REGION 1..15: note = Synthetic
GSSNSAFVSTSSSRR

SEQ ID NO: 1136 - protein, 15 aa, synthetic construct
  REGION 1..15: note = Synthetic
GSTKSCARTLVSGSF

SEQ ID NO: 1137 - protein, 15 aa, synthetic construct
  REGION 1..15: note = Synthetic
GSYYKQYHPTACEVE

SEQ ID NO: 1138 - protein, 15 aa, synthetic construct
  REGION 1..15: note = Synthetic
GTHTTAVSETRQTWA

SEQ ID NO: 1139 - protein, 15 aa, synthetic construct
  REGION 1..15: note = Synthetic
GTIINQDPDKILTYI

SEQ ID NO: 1140 - protein, 11 aa, synthetic construct
  REGION 1..11: note = Synthetic
GTLVRMAPVIG

SEQ ID NO: 1141 - protein, 13 aa, synthetic construct
  REGION 1..13: note = Synthetic
GTPLDIDTASESS

SEQ ID NO: 1142 - protein, 28 aa, synthetic construct
  REGION 1..28: note = Synthetic
GTYLGQAYGGIIKDAPPGAGFIYRETFC

SEQ ID NO: 1143 - protein, 17 aa, synthetic construct
  REGION 1..17: note = Synthetic
GVATKGLGVHAKSSDWG

SEQ ID NO: 1144 - protein, 20 aa, synthetic construct
  REGION 1..20: note = Synthetic
GVLLPTIPGKLDVNKSKTHI

SEQ ID NO: 1145 - protein, 15 aa, synthetic construct
  REGION 1..15: note = Synthetic
GVLSVDLSLTVELKI

SEQ ID NO: 1146 - protein, 15 aa, synthetic construct
  REGION 1..15: note = Synthetic
GVPIELQVECFTWDQ

SEQ ID NO: 1147 - protein, 15 aa, synthetic construct
  REGION 1..15: note = Synthetic
GVSCTVTREDGTNRR

SEQ ID NO: 1148 - protein, 15 aa, synthetic construct
  REGION 1..15: note = Synthetic
GVSYNIGSQEWYTTV

SEQ ID NO: 1149 - protein, 15 aa, synthetic construct
  REGION 1..15: note = Synthetic
GYNVSSIVTMTSQGM

SEQ ID NO: 1150 - protein, 15 aa, synthetic construct
  REGION 1..15: note = Synthetic
HFCVLADSESGGHIT

SEQ ID NO: 1151 - protein, 15 aa, synthetic construct
  REGION 1..15: note = Synthetic
HGEDSITIPYQGSGK

SEQ ID NO: 1152 - protein, 8 aa, synthetic construct
  REGION 1..8: note = Synthetic
HGPDWASP

SEQ ID NO: 1153 - protein, 15 aa, synthetic construct
  REGION 1..15: note = Synthetic
HGPDWASPVCQRHSP

SEQ ID NO: 1154 - protein, 22 aa, synthetic construct
  REGION 1..22: note = Synthetic
HGPDWASPVCQRHSPDCSRLVG

SEQ ID NO: 1155 - protein, 33 aa, synthetic construct
  REGION 1..33: note = Synthetic
HGPDWASPVCQRHSPDCSRLVGATPERPRLRLV

SEQ ID NO: 1156 - protein, 15 aa, synthetic construct
  REGION 1..15: note = Synthetic
HITHSGMEGMGVSCT

SEQ ID NO: 1157 - protein, 15 aa, synthetic construct
  REGION 1..15: note = Synthetic
HKSLSTNLDVTNSIE

SEQ ID NO: 1158 - protein, 9 aa, synthetic construct
  REGION 1..9: note = Synthetic
HLMIDRPYV

SEQ ID NO: 1159 - protein, 13 aa, synthetic construct
  REGION 1..13: note = Synthetic
HLPTGTPLDIDTA

SEQ ID NO: 1160 - protein, 24 aa, synthetic construct
  REGION 1..24: note = Synthetic
HLPTGTPLDIDTATESSQDPQDSR

SEQ ID NO: 1161 - protein, 15 aa, synthetic construct
  REGION 1..15: note = Synthetic
HMTNYLEQPVSNDLS

SEQ ID NO: 1162 - protein, 15 aa, synthetic construct
  REGION 1..15: note = Synthetic
HQSLVIKLMPNITLL

SEQ ID NO: 1163 - protein, 15 aa, synthetic construct
  REGION 1..15: note = Synthetic
HRAAIYTAEIHKSLS

SEQ ID NO: 1164 - protein, 18 aa, synthetic construct
  REGION 1..18: note = Synthetic
HRMQEAVEAERAGRGTGH

SEQ ID NO: 1165 - protein, 15 aa, synthetic construct
  REGION 1..15: note = Synthetic
HVDTESYFIVLSIAY

SEQ ID NO: 1166 - protein, 15 aa, synthetic construct
  REGION 1..15: note = Synthetic
HWGNLSKIGVVGIGS

SEQ ID NO: 1167 - protein, 15 aa, synthetic construct
  REGION 1..15: note = Synthetic
HWWQLTLGATCALPL

SEQ ID NO: 1168 - protein, 23 aa, synthetic construct
  REGION 1..23: note = Synthetic
HYRNASDVLPGHWLQGGWGCYNL

SEQ ID NO: 1169 - protein, 15 aa, synthetic construct
  REGION 1..15: note = Synthetic
IDLGPPISLERLDVG

SEQ ID NO: 1170 - protein, 15 aa, synthetic construct
  REGION 1..15: note = Synthetic
IEAIRQAGQEMILAV

SEQ ID NO: 1171 - protein, 9 aa, synthetic construct
  REGION 1..9: note = Synthetic
IETRSARHP

SEQ ID NO: 1172 - protein, 15 aa, synthetic construct
  REGION 1..15: note = Synthetic
IGSQEWYTTVPKYVA

SEQ ID NO: 1173 - protein, 15 aa, synthetic construct
  REGION 1..15: note = Synthetic
IKGVIVHRLEGVSYN

SEQ ID NO: 1174 - protein, 15 aa, synthetic construct
  REGION 1..15: note = Synthetic
IKHIIIVPIPGDSSI

SEQ ID NO: 1175 - protein, 20 aa, synthetic construct
  REGION 1..20: note = Synthetic
IKHIIIVPIPGDSSITTRSR

SEQ ID NO: 1176 - protein, 7 aa, synthetic construct
  REGION 1..7: note = Synthetic
IKLKDCP

SEQ ID NO: 1177 - protein, 15 aa, synthetic construct
  REGION 1..15: note = Synthetic
IKLMPNITLLNNCTR

SEQ ID NO: 1178 - protein, 10 aa, synthetic construct
  REGION 1..10: note = Synthetic
ILLERLDVGT

SEQ ID NO: 1179 - protein, 10 aa, synthetic construct
  REGION 1..10: note = Synthetic
ILPGQDLQYV

SEQ ID NO: 1180 - protein, 15 aa, synthetic construct
  REGION 1..15: note = Synthetic
ILTYIAADHCPVVEV

SEQ ID NO: 1181 - protein, 11 aa, synthetic construct
  REGION 1..11: note = Synthetic
INQDPDKILTY

SEQ ID NO: 1182 - protein, 15 aa, synthetic construct
  REGION 1..15: note = Synthetic
IPRFKVSPYLFNVPI

SEQ ID NO: 1183 - protein, 15 aa, synthetic construct
  REGION 1..15: note = Synthetic
IQALSYALGGDINKV

SEQ ID NO: 1184 - protein, 15 aa, synthetic construct
  REGION 1..15: note = Synthetic
IRAGPYGHATVEMPE

SEQ ID NO: 1185 - protein, 7 aa, synthetic construct
  REGION 1..7: note = Synthetic
IRMGTDK

SEQ ID NO: 1186 - protein, 15 aa, synthetic construct
  REGION 1..15: note = Synthetic
ISNFDESSCTFMPEG

SEQ ID NO: 1187 - protein, 15 aa, synthetic construct
  REGION 1..15: note = Synthetic
ITAGIALHQSMLNSQ

SEQ ID NO: 1188 - protein, 15 aa, synthetic construct
  REGION 1..15: note = Synthetic
ITDDPDVSIRLLEVV

SEQ ID NO: 1189 - protein, 20 aa, synthetic construct
  REGION 1..20: note = Synthetic
ITDDPDVSIRLLEVVQSDQS

SEQ ID NO: 1190 - protein, 5 aa, synthetic construct
  REGION 1..5: note = Synthetic
ITTYV

SEQ ID NO: 1191 - protein, 15 aa, synthetic construct
  REGION 1..15: note = Synthetic
IVEAGLASFILTIKF

SEQ ID NO: 1192 - protein, 20 aa, synthetic construct
  REGION 1..20: note = Synthetic
IVEAGLASFILTIKFGIETM

SEQ ID NO: 1193 - protein, 25 aa, synthetic construct
  REGION 1..25: note = Synthetic
IVEAGLASFILTIKFGIETMYPALG

SEQ ID NO: 1194 - protein, 16 aa, synthetic construct
  REGION 1..16: note = Synthetic
KALEAQSRALRAELAA

SEQ ID NO: 1195 - protein, 15 aa, synthetic construct
  REGION 1..15: note = Synthetic
KARITHVDTESYFIV

SEQ ID NO: 1196 - protein, 15 aa, synthetic construct
  REGION 1..15: note = Synthetic
KCGLHIRAGPYGHAT

SEQ ID NO: 1197 - protein, 15 aa, synthetic construct
  REGION 1..15: note = Synthetic
KCYTTGTIINQDPDK

SEQ ID NO: 1198 - protein, 10 aa, synthetic construct
  REGION 1..10: note = Synthetic
KDNPHPKGSR

SEQ ID NO: 1199 - protein, 15 aa, synthetic construct
  REGION 1..15: note = Synthetic
KDNRIPSYGVLSVDL

SEQ ID NO: 1200 - protein, 15 aa, synthetic construct
  REGION 1..15: note = Synthetic
KFLNPDREYDFRDLT

SEQ ID NO: 1201 - protein, 9 aa, synthetic construct
  REGION 1..9: note = Synthetic
KFVTAALLN

SEQ ID NO: 1202 - protein, 11 aa, synthetic construct
  REGION 1..11: note = Synthetic
KGNCSGPTTIR

SEQ ID NO: 1203 - protein, 15 aa, synthetic construct
  REGION 1..15: note = Synthetic
KIKFLNPDREYDFRD

SEQ ID NO: 1204 - protein, 15 aa, synthetic construct
  REGION 1..15: note = Synthetic
KIVDGGCFAPWDLEA

SEQ ID NO: 1205 - protein, 15 aa, synthetic construct
  REGION 1..15: note = Synthetic
KLGLKLLRYYTEILS

SEQ ID NO: 1206 - protein, 15 aa, synthetic construct
  REGION 1..15: note = Synthetic
KLGVWKSPTDMQSWV

SEQ ID NO: 1207 - protein, 7 aa, synthetic construct
  REGION 1..7: note = Synthetic
KLKECPQ

SEQ ID NO: 1208 - protein, 9 aa, synthetic construct
  REGION 1..9: note = Synthetic
KLLRYYTEI

SEQ ID NO: 1209 - protein, 10 aa, synthetic construct
  REGION 1..10: note = Synthetic
KLMPFSGDFV

SEQ ID NO: 1210 - protein, 9 aa, synthetic construct
  REGION 1..9: note = Synthetic
KLMPNITLL

SEQ ID NO: 1211 - protein, 26 aa, synthetic construct
  REGION 1..26: note = Synthetic
KLRMETCFQQACKGKIQALCENPEWA

SEQ ID NO: 1212 - protein, 9 aa, synthetic construct
  REGION 1..9: note = Synthetic
KLWCRHFCV

SEQ ID NO: 1213 - protein, 10 aa, synthetic construct
  REGION 1..10: note = Synthetic
KLWCRHFCVL

SEQ ID NO: 1214 - protein, 9 aa, synthetic construct
  REGION 1..9: note = Synthetic
KLWESPQEI

SEQ ID NO: 1215 - protein, 9 aa, synthetic construct
  REGION 1..9: note = Synthetic
KMSSAVGFV

SEQ ID NO: 1216 - protein, 17 aa, synthetic construct
  REGION 1..17: note = Synthetic
KMSSAVGFVPDTGPASR

SEQ ID NO: 1217 - protein, 7 aa, synthetic construct
  REGION 1..7: note = Synthetic
KMVYATN

SEQ ID NO: 1218 - protein, 15 aa, synthetic construct
  REGION 1..15: note = Synthetic
KPDLTGTSKSYVRSL

SEQ ID NO: 1219 - protein, 15 aa, synthetic construct
  REGION 1..15: note = Synthetic
KPNLSSKRSELSQLS

SEQ ID NO: 1220 - protein, 20 aa, synthetic construct
  REGION 1..20: note = Synthetic
KPNLSSKRSELSQLSMYRVF

SEQ ID NO: 1221 - protein, 15 aa, synthetic construct
  REGION 1..15: note = Synthetic
KQSRGEARESYRETG

SEQ ID NO: 1222 - protein, 20 aa, synthetic construct
  REGION 1..20: note = Synthetic
KQSRGEARESYRETGPSRAS

SEQ ID NO: 1223 - protein, 15 aa, synthetic construct
  REGION 1..15: note = Synthetic
KRFAGVVLAGAALGV

SEQ ID NO: 1224 - protein, 15 aa, synthetic construct
  REGION 1..15: note = Synthetic
KRTPGNKPRIAEMIC

SEQ ID NO: 1225 - protein, 20 aa, synthetic construct
  REGION 1..20: note = Synthetic
KRTPGNKPRIAEMICDIDTY

SEQ ID NO: 1226 - protein, 26 aa, synthetic construct
  REGION 1..26: note = Synthetic
KSNHNNVYWLTIPPMKNLALGVINTL

SEQ ID NO: 1227 - protein, 9 aa, synthetic construct
  REGION 1..9: note = Synthetic
KVSPYLFNV

SEQ ID NO: 1228 - protein, 17 aa, synthetic construct
  REGION 1..17: note = Synthetic
KVVQLPKISKNALKANG

SEQ ID NO: 1229 - protein, 17 aa, synthetic construct
  REGION 1..17: note = Synthetic
KVVQLPKISKNALRNDG

SEQ ID NO: 1230 - protein, 12 aa, synthetic construct
  REGION 1..12: note = Synthetic
LAHRRIPPENIR

SEQ ID NO: 1231 - protein, 12 aa, synthetic construct
  REGION 1..12: note = Synthetic
LALALWAGFALS

SEQ ID NO: 1232 - protein, 15 aa, synthetic construct
  REGION 1..15: note = Synthetic
LAPGGGNCHLTVNGE

SEQ ID NO: 1233 - protein, 15 aa, synthetic construct
  REGION 1..15: note = Synthetic
LAQIWVLLAKAVTAP

SEQ ID NO: 1234 - protein, 20 aa, synthetic construct
  REGION 1..20: note = Synthetic
LAQIWVLLAKAVTAPDTAAD

SEQ ID NO: 1235 - protein, 29 aa, synthetic construct
  REGION 1..29: note = Synthetic
LASYFNPGGSYYKQYHPTACEVEPAFGHS

SEQ ID NO: 1236 - protein, 15 aa, synthetic construct
  REGION 1..15: note = Synthetic
LAVSKGNCSGPTTIR

SEQ ID NO: 1237 - protein, 15 aa, synthetic construct
  REGION 1..15: note = Synthetic
LCENPEWAPLKDNRI

SEQ ID NO: 1238 - protein, 9 aa, synthetic construct
  REGION 1..9: note = Synthetic
LDRLVRLIG

SEQ ID NO: 1239 - protein, 9 aa, synthetic construct
  REGION 1..9: note = Synthetic
LEEEGVTPL

SEQ ID NO: 1240 - protein, 22 aa, synthetic construct
  REGION 1..22: note = Synthetic
LEHRMQEAVEAERAGRGTGHFI

SEQ ID NO: 1241 - protein, 15 aa, synthetic construct
  REGION 1..15: note = Synthetic
LEKLGYSGGDLLGIL

SEQ ID NO: 1242 - protein, 10 aa, synthetic construct
  REGION 1..10: note = Synthetic
LEQPVSNDLS

SEQ ID NO: 1243 - protein, 15 aa, synthetic construct
  REGION 1..15: note = Synthetic
LERKWLDVVRNIIAE

SEQ ID NO: 1244 - protein, 20 aa, synthetic construct
  REGION 1..20: note = Synthetic
LERKWLDVVRNIIAEDLSLR

SEQ ID NO: 1245 - protein, 15 aa, synthetic construct
  REGION 1..15: note = Synthetic
LFGPSLRDPISAEIS

SEQ ID NO: 1246 - protein, 15 aa, synthetic construct
  REGION 1..15: note = Synthetic
LGELKLAALCHGEDS

SEQ ID NO: 1247 - protein, 13 aa, synthetic construct
  REGION 1..13: note = Synthetic
LGGKEDRRVKQSR

SEQ ID NO: 1248 - protein, 24 aa, synthetic construct
  REGION 1..24: note = Synthetic
LGHDGHHGGTLRVGQHHRNASDVL

SEQ ID NO: 1249 - protein, 20 aa, synthetic construct
  REGION 1..20: note = Synthetic
LGSPNCHGPDWASPVCQRHS

SEQ ID NO: 1250 - protein, 27 aa, synthetic construct
  REGION 1..27: note = Synthetic
LGSPNCHGPDWASPVCQRHSPDCSRLV

SEQ ID NO: 1251 - protein, 18 aa, synthetic construct
  REGION 1..18: note = Synthetic
LHDPDTEAPTEACVTSWL

SEQ ID NO: 1252 - protein, 15 aa, synthetic construct
  REGION 1..15: note = Synthetic
LIANCASILCKCYTT

SEQ ID NO: 1253 - protein, 24 aa, synthetic construct
  REGION 1..24: note = Synthetic
LIGLLAIAGIRLHRAAIYTAEIHK

SEQ ID NO: 1254 - protein, 15 aa, synthetic construct
  REGION 1..15: note = Synthetic
LIPSMNQLSCDLIGQ

SEQ ID NO: 1255 - protein, 15 aa, synthetic construct
  REGION 1..15: note = Synthetic
LKIKIASGFGPLITH

SEQ ID NO: 1256 - protein, 23 aa, synthetic construct
  REGION 1..23: note = Synthetic
LKIKIASGFGPLITHGSGMDLYK

SEQ ID NO: 1257 - protein, 7 aa, synthetic construct
  REGION 1..7: note = Synthetic
LKLYFEP

SEQ ID NO: 1258 - protein, 10 aa, synthetic construct
  REGION 1..10: note = Synthetic
LLAVLFVMFL

SEQ ID NO: 1259 - protein, 15 aa, synthetic construct
  REGION 1..15: note = Synthetic
LLDRLVRLIGNPDVS

SEQ ID NO: 1260 - protein, 20 aa, synthetic construct
  REGION 1..20: note = Synthetic
LLDRLVRLIGNPDVSGPKLT

SEQ ID NO: 1261 - protein, 15 aa, synthetic construct
  REGION 1..15: note = Synthetic
LLESSDQILRSMKGL

SEQ ID NO: 1262 - protein, 15 aa, synthetic construct
  REGION 1..15: note = Synthetic
LLETRTTNQFLAVSK

SEQ ID NO: 1263 - protein, 15 aa, synthetic construct
  REGION 1..15: note = Synthetic
LLEVVQSDQSQSGLT

SEQ ID NO: 1264 - protein, 19 aa, synthetic construct
  REGION 1..19: note = Synthetic
LLEVVQSDQSQSGLTFASR

SEQ ID NO: 1265 - protein, 20 aa, synthetic construct
  REGION 1..20: note = Synthetic
LLEVVQSDQSQSGLTFASRG

SEQ ID NO: 1266 - protein, 15 aa, synthetic construct
  REGION 1..15: note = Synthetic
LLGILESRGIKARIT

SEQ ID NO: 1267 - protein, 8 aa, synthetic construct
  REGION 1..8: note = Synthetic
LLRTAPGP

SEQ ID NO: 1268 - protein, 15 aa, synthetic construct
  REGION 1..15: note = Synthetic
LLRYYTEILSLFGPS

SEQ ID NO: 1269 - protein, 20 aa, synthetic construct
  REGION 1..20: note = Synthetic
LLVPWVLIFMVCRRACRRRG

SEQ ID NO: 1270 - protein, 10 aa, synthetic construct
  REGION 1..10: note = Synthetic
LLWRSRCKIV

SEQ ID NO: 1271 - protein, 9 aa, synthetic construct
  REGION 1..9: note = Synthetic
LLWSYAMGV

SEQ ID NO: 1272 - protein, 15 aa, synthetic construct
  REGION 1..15: note = Synthetic
LLWSYAMGVGVELEN

SEQ ID NO: 1273 - protein, 20 aa, synthetic construct
  REGION 1..20: note = Synthetic
LLWSYAMGVGVELENSMGGL

SEQ ID NO: 1274 - protein, 9 aa, synthetic construct
  REGION 1..9: note = Synthetic
LMIDRPYVL

SEQ ID NO: 1275 - protein, 15 aa, synthetic construct
  REGION 1..15: note = Synthetic
LNAMTQNIRPVQSVA

SEQ ID NO: 1276 - protein, 15 aa, synthetic construct
  REGION 1..15: note = Synthetic
LNTPPPYQVSCGGES

SEQ ID NO: 1277 - protein, 15 aa, synthetic construct
  REGION 1..15: note = Synthetic
LRDPISAEISIQALS

SEQ ID NO: 1278 - protein, 16 aa, synthetic construct
  REGION 1..16: note = Synthetic
LRGSGDLQEYLRHVTR

SEQ ID NO: 1279 - protein, 8 aa, synthetic construct
  REGION 1..8: note = Synthetic
LRLVDADD

SEQ ID NO: 1280 - protein, 12 aa, synthetic construct
  REGION 1..12: note = Synthetic
LRLVDADDPLLR

SEQ ID NO: 1281 - protein, 31 aa, synthetic construct
  REGION 1..31: note = Synthetic
LRLVDADDPLLRTAPGPGEVWVTPVIGSQAR

SEQ ID NO: 1282 - protein, 28 aa, synthetic construct
  REGION 1..28: note = Synthetic
LRRLLYMIYMSGLAVRVHVSKEEQYYDY

SEQ ID NO: 1283 - protein, 8 aa, synthetic construct
  REGION 1..8: note = Synthetic
LRTAPGPG

SEQ ID NO: 1284 - protein, 20 aa, synthetic construct
  REGION 1..20: note = Synthetic
LRVGQHYRNASDVLPGHWLQ

SEQ ID NO: 1285 - protein, 5 aa, synthetic construct
  REGION 1..5: note = Synthetic
LRYLA

SEQ ID NO: 1286 - protein, 13 aa, synthetic construct
  REGION 1..13: note = Synthetic
LSCKPWQESRKNK

SEQ ID NO: 1287 - protein, 15 aa, synthetic construct
  REGION 1..15: note = Synthetic
LSEIKGVIVHRLEGV

SEQ ID NO: 1288 - protein, 15 aa, synthetic construct
  REGION 1..15: note = Synthetic
LSIAYPTLSEIKGVI

SEQ ID NO: 1289 - protein, 15 aa, synthetic construct
  REGION 1..15: note = Synthetic
LSLLDLYLGRGYNVS

SEQ ID NO: 1290 - protein, 15 aa, synthetic construct
  REGION 1..15: note = Synthetic
LSQGNLIANCASILC

SEQ ID NO: 1291 - protein, 15 aa, synthetic construct
  REGION 1..15: note = Synthetic
LSSHRGVIADNQAKW

SEQ ID NO: 1292 - protein, 15 aa, synthetic construct
  REGION 1..15: note = Synthetic
LSVDLSLTVELKIKI

SEQ ID NO: 1293 - protein, 14 aa, synthetic construct
  REGION 1..14: note = Synthetic
LTGISICNPGSSLC

SEQ ID NO: 1294 - protein, 15 aa, synthetic construct
  REGION 1..15: note = Synthetic
LTIKFGIETMYPALG

SEQ ID NO: 1295 - protein, 20 aa, synthetic construct
  REGION 1..20: note = Synthetic
LTIKFGIETMYPALGLHEFA

SEQ ID NO: 1296 - protein, 15 aa, synthetic construct
  REGION 1..15: note = Synthetic
LTLQTPTGQIHWGNL

SEQ ID NO: 1297 - protein, 8 aa, synthetic construct
  REGION 1..8: note = Synthetic
LVDADDPL

SEQ ID NO: 1298 - protein, 10 aa, synthetic construct
  REGION 1..10: note = Synthetic
LVDADDPLLR

SEQ ID NO: 1299 - protein, 15 aa, synthetic construct
  REGION 1..15: note = Synthetic
LVEKPNLSSKRSELS

SEQ ID NO: 1300 - protein, 7 aa, synthetic construct
  REGION 1..7: note = Synthetic
LVGATPE

SEQ ID NO: 1301 - protein, 8 aa, synthetic construct
  REGION 1..8: note = Synthetic
LVGATPER

SEQ ID NO: 1302 - protein, 15 aa, synthetic construct
  REGION 1..15: note = Synthetic
LVKLGVWKSPTGMQS

SEQ ID NO: 1303 - protein, 18 aa, synthetic construct
  REGION 1..18: note = Synthetic
LVSGSFGNRFILSQGNLI

SEQ ID NO: 1304 - protein, 15 aa, synthetic construct
  REGION 1..15: note = Synthetic
LYKSNHNNVYWLTIP

SEQ ID NO: 1305 - protein, 25 aa, synthetic construct
  REGION 1..25: note = Synthetic
LYPMSPLLQECLRGSTKSCARTLVS

SEQ ID NO: 1306 - protein, 18 aa, synthetic construct
  REGION 1..18: note = Synthetic
MASTTPITMEDLQKALEA

SEQ ID NO: 1307 - protein, 21 aa, synthetic construct
  REGION 1..21: note = Synthetic
MASTTPITMEDLQKALEAQSR

SEQ ID NO: 1308 - protein, 29 aa, synthetic construct
  REGION 1..29: note = Synthetic
MASTTPITMEDLQKALEAQSRALRAELAA

SEQ ID NO: 1309 - protein, 29 aa, synthetic construct
  REGION 1..29: note = Synthetic
MASTTPITMEDLQKALEAQSRALRAGLAA

SEQ ID NO: 1310 - protein, 29 aa, synthetic construct
  REGION 1..29: note = Synthetic
MASTTPITMEDLQKALETQSRVLRAGLTA

SEQ ID NO: 1311 - protein, 15 aa, synthetic construct
  REGION 1..15: note = Synthetic
MATLLRSLALFKRNK

SEQ ID NO: 1312 - protein, 20 aa, synthetic construct
  REGION 1..20: note = Synthetic
MATLLRSLALFKRNKDKPPI

SEQ ID NO: 1313 - protein, 15 aa, synthetic construct
  REGION 1..15: note = Synthetic
MDLYKSNHNNVYWLT

SEQ ID NO: 1314 - protein, 14 aa, synthetic construct
  REGION 1..14: note = Synthetic
MEDLQKALEAQSRA

SEQ ID NO: 1315 - protein, 21 aa, synthetic construct
  REGION 1..21: note = Synthetic
MEDLQKALEAQSRALRAELAA

SEQ ID NO: 1316 - protein, 15 aa, synthetic construct
  REGION 1..15: note = Synthetic
MGLKVNVSAIFMAVL

SEQ ID NO: 1317 - protein, 15 aa, synthetic construct
  REGION 1..15: note = Synthetic
MIDRPYVLLAVLFVM

SEQ ID NO: 1318 - protein, 15 aa, synthetic construct
  REGION 1..15: note = Synthetic
MILAVQGVQDYINNE

SEQ ID NO: 1319 - protein, 15 aa, synthetic construct
  REGION 1..15: note = Synthetic
MLNSQAIDNLRASLE

SEQ ID NO: 1320 - protein, 15 aa, synthetic construct
  REGION 1..15: note = Synthetic
MNALVNSTLLETRTT

SEQ ID NO: 1321 - protein, 32 aa, synthetic construct
  REGION 1..32: note = Synthetic
MNYTGNQQSRWGLGSPNCHGPDWASPVCQRHS

SEQ ID NO: 1322 - protein, 15 aa, synthetic construct
  REGION 1..15: note = Synthetic
MQSWVPLSTDDPVID

SEQ ID NO: 1323 - protein, 15 aa, synthetic construct
  REGION 1..15: note = Synthetic
MSLSLLDLYLGRGYN

SEQ ID NO: 1324 - protein, 15 aa, synthetic construct
  REGION 1..15: note = Synthetic
MSPLLQECLRGSTKS

SEQ ID NO: 1325 - protein, 15 aa, synthetic construct
  REGION 1..15: note = Synthetic
MSPQRDRINAFYKDN

SEQ ID NO: 1326 - protein, 15 aa, synthetic construct
  REGION 1..15: note = Synthetic
MYRVFEVSVIRNPGL

SEQ ID NO: 1327 - protein, 15 aa, synthetic construct
  REGION 1..15: note = Synthetic
NALYPMSPLLQECLR

SEQ ID NO: 1328 - protein, 26 aa, synthetic construct
  REGION 1..26: note = Synthetic
NCHGPDWASPVCQRHSPDCSRLVGAT

SEQ ID NO: 1329 - protein, 15 aa, synthetic construct
  REGION 1..15: note = Synthetic
NFGRSYFDPAYFRLG

SEQ ID NO: 1330 - protein, 20 aa, synthetic construct
  REGION 1..20: note = Synthetic
NFGRSYFDPAYFRLGQEMVR

SEQ ID NO: 1331 - protein, 15 aa, synthetic construct
  REGION 1..15: note = Synthetic
NGTQRACTFWAVNAY

SEQ ID NO: 1332 - protein, 15 aa, synthetic construct
  REGION 1..15: note = Synthetic
NGVTIQVGSRRYPDA

SEQ ID NO: 1333 - protein, 15 aa, synthetic construct
  REGION 1..15: note = Synthetic
NIIAEDLSLRRFMVA

SEQ ID NO: 1334 - protein, 20 aa, synthetic construct
  REGION 1..20: note = Synthetic
NIIAEDLSLRRFMVALILDI

SEQ ID NO: 1335 - protein, 15 aa, synthetic construct
  REGION 1..15: note = Synthetic
NITLLNNCTRVEIAE

SEQ ID NO: 1336 - protein, 15 aa, synthetic construct
  REGION 1..15: note = Synthetic
NLALGVINTLEWIPR

SEQ ID NO: 1337 - protein, 18 aa, synthetic construct
  REGION 1..18: note = Synthetic
NLFQVVHWSYNRPAYSPG

SEQ ID NO: 1338 - protein, 15 aa, synthetic construct
  REGION 1..15: note = Synthetic
NLVILPGQDLQYVLA

SEQ ID NO: 1339 - protein, 15 aa, synthetic construct
  REGION 1..15: note = Synthetic
NLYQQMGKPAPYMVN

SEQ ID NO: 1340 - protein, 20 aa, synthetic construct
  REGION 1..20: note = Synthetic
NLYQQMGKPAPYMVNLENSI

SEQ ID NO: 1341 - protein, 15 aa, synthetic construct
  REGION 1..15: note = Synthetic
NNCTRVEIAEYRRLL

SEQ ID NO: 1342 - protein, 10 aa, synthetic construct
  REGION 1..10: note = Synthetic
NPDREYDFRD

SEQ ID NO: 1343 - protein, 9 aa, synthetic construct
  REGION 1..9: note = Synthetic
NPDVSGPKL

SEQ ID NO: 1344 - protein, 15 aa, synthetic construct
  REGION 1..15: note = Synthetic
NPDVSGPKLTGALIG

SEQ ID NO: 1345 - protein, 20 aa, synthetic construct
  REGION 1..20: note = Synthetic
NPDVSGPKLTGALIGILSLF

SEQ ID NO: 1346 - protein, 15 aa, synthetic construct
  REGION 1..15: note = Synthetic
NPPERIKLDYDQYCA

SEQ ID NO: 1347 - protein, 15 aa, synthetic construct
  REGION 1..15: note = Synthetic
NQAKWAVPTTRTDDK

SEQ ID NO: 1348 - protein, 15 aa, synthetic construct
  REGION 1..15: note = Synthetic
NQDPDKILTYIAADH

SEQ ID NO: 1349 - protein, 15 aa, synthetic construct
  REGION 1..15: note = Synthetic
NQLSCDLIGQKLGLK

SEQ ID NO: 1350 - protein, 27 aa, synthetic construct
  REGION 1..27: note = Synthetic
NQQSRWGLGSPNCHGPDWASPVCQRHS

SEQ ID NO: 1351 - protein, 12 aa, synthetic construct
  REGION 1..12: note = Synthetic
NSTLGVKSAREF

SEQ ID NO: 1352 - protein, 15 aa, synthetic construct
  REGION 1..15: note = Synthetic
NTPHGQLEVQVPPDP

SEQ ID NO: 1353 - protein, 15 aa, synthetic construct
  REGION 1..15: note = Synthetic
NVSAIFMAVLLTLQT

SEQ ID NO: 1354 - protein, 15 aa, synthetic construct
  REGION 1..15: note = Synthetic
PAEVDGDVKLSSNLV

SEQ ID NO: 1355 - protein, 15 aa, synthetic construct
  REGION 1..15: note = Synthetic
PAFGHSDAACWGFPT

SEQ ID NO: 1356 - protein, 15 aa, synthetic construct
  REGION 1..15: note = Synthetic
PALICCCRGRCNKKG

SEQ ID NO: 1357 - protein, 13 aa, synthetic construct
  REGION 1..13: note = Synthetic
PDKILTYIAADHC

SEQ ID NO: 1358 - protein, 15 aa, synthetic construct
  REGION 1..15: note = Synthetic
PERIKLDYDQYCADV

SEQ ID NO: 1359 - protein, 8 aa, synthetic construct
  REGION 1..8: note = Synthetic
PERPRLRL

SEQ ID NO: 1360 - protein, 15 aa, synthetic construct
  REGION 1..15: note = Synthetic
PGCATQAPVPVRLAG

SEQ ID NO: 1361 - protein, 29 aa, synthetic construct
  REGION 1..29: note = Synthetic
PGCATQAPVPVRLAGVRFESKIVDGGCFA

SEQ ID NO: 1362 - protein, 8 aa, synthetic construct
  REGION 1..8: note = Synthetic
PGEVWVTP

SEQ ID NO: 1363 - protein, 15 aa, synthetic construct
  REGION 1..15: note = Synthetic
PGEVWVTPVIGSQAR

SEQ ID NO: 1364 - protein, 16 aa, synthetic construct
  REGION 1..16: note = Synthetic
PGKLDVNKSKTHISVN

SEQ ID NO: 1365 - protein, 15 aa, synthetic construct
  REGION 1..15: note = Synthetic
PGLGAPVFHMTNYLE

SEQ ID NO: 1366 - protein, 8 aa, synthetic construct
  REGION 1..8: note = Synthetic
PGPGEVWV

SEQ ID NO: 1367 - protein, 15 aa, synthetic construct
  REGION 1..15: note = Synthetic
PHKTVRVKFHTETRT

SEQ ID NO: 1368 - protein, 15 aa, synthetic construct
  REGION 1..15: note = Synthetic
PIELQVECFTWDQKL

SEQ ID NO: 1369 - protein, 10 aa, synthetic construct
  REGION 1..10: note = Synthetic
PISLERLDVG

SEQ ID NO: 1370 - protein, 15 aa, synthetic construct
  REGION 1..15: note = Synthetic
PISLERLDVGTNLGN

SEQ ID NO: 1371 - protein, 15 aa, synthetic construct
  REGION 1..15: note = Synthetic
PKALFTQQGGAYGRC

SEQ ID NO: 1372 - protein, 15 aa, synthetic construct
  REGION 1..15: note = Synthetic
PKYVATQGYLISNFD

SEQ ID NO: 1373 - protein, 13 aa, synthetic construct
  REGION 1..13: note = Synthetic
PLDIDTASESSQD

SEQ ID NO: 1374 - protein, 15 aa, synthetic construct
  REGION 1..15: note = Synthetic
PLGLKFKTVRPVALP

SEQ ID NO: 1375 - protein, 15 aa, synthetic construct
  REGION 1..15: note = Synthetic
PLITHGSGMDLYKSN

SEQ ID NO: 1376 - protein, 15 aa, synthetic construct
  REGION 1..15: note = Synthetic
PLKDNRIPSYGVLSV

SEQ ID NO: 1377 - protein, 8 aa, synthetic construct
  REGION 1..8: note = Synthetic
PLLRTAPG

SEQ ID NO: 1378 - protein, 13 aa, synthetic construct
  REGION 1..13: note = Synthetic
PLLSCKPWQESRK

SEQ ID NO: 1379 - protein, 14 aa, synthetic construct
  REGION 1..14: note = Synthetic
PPATVYRYDSRPPE

SEQ ID NO: 1380 - protein, 12 aa, synthetic construct
  REGION 1..12: note = Synthetic
PPISLERLDVGT

SEQ ID NO: 1381 - protein, 20 aa, synthetic construct
  REGION 1..20: note = Synthetic
PPPPEERQETRSQTPAPKPS

SEQ ID NO: 1382 - protein, 15 aa, synthetic construct
  REGION 1..15: note = Synthetic
PQEQITQHGSPYGRC

SEQ ID NO: 1383 - protein, 18 aa, synthetic construct
  REGION 1..18: note = Synthetic
PQEQITQHGSPYGRCANK

SEQ ID NO: 1384 - protein, 25 aa, synthetic construct
  REGION 1..25: note = Synthetic
PQPGPQPPQPPQPQPEAPAPQPPAG

SEQ ID NO: 1385 - protein, 13 aa, synthetic construct
  REGION 1..13: note = Synthetic
PRLGGKEDRRVKQ

SEQ ID NO: 1386 - protein, 8 aa, synthetic construct
  REGION 1..8: note = Synthetic
PRLRLVDA

SEQ ID NO: 1387 - protein, 15 aa, synthetic construct
  REGION 1..15: note = Synthetic
PRNVRVTGCYQCGTP

SEQ ID NO: 1388 - protein, 13 aa, synthetic construct
  REGION 1..13: note = Synthetic
PSRASDARAAHLP

SEQ ID NO: 1389 - protein, 15 aa, synthetic construct
  REGION 1..15: note = Synthetic
PTGQIHWGNLSKIGV

SEQ ID NO: 1390 - protein, 13 aa, synthetic construct
  REGION 1..13: note = Synthetic
PTGTPLDIDTASE

SEQ ID NO: 1391 - protein, 15 aa, synthetic construct
  REGION 1..15: note = Synthetic
PTLSEIKGVIVHRLE

SEQ ID NO: 1392 - protein, 15 aa, synthetic construct
  REGION 1..15: note = Synthetic
PTTIRGQFSNMSLSL

SEQ ID NO: 1393 - protein, 10 aa, synthetic construct
  REGION 1..10: note = Synthetic
PTTRTDDKLR

SEQ ID NO: 1394 - protein, 21 aa, synthetic construct
  REGION 1..21: note = Synthetic
PTTRTDDKLRMETCFQQACKG

SEQ ID NO: 1395 - protein, 15 aa, synthetic construct
  REGION 1..15: note = Synthetic
PVALPRTLAPPRNVR

SEQ ID NO: 1396 - protein, 19 aa, synthetic construct
  REGION 1..19: note = Synthetic
PVFAGANYAAWAVNVAQVI

SEQ ID NO: 1397 - protein, 8 aa, synthetic construct
  REGION 1..8: note = Synthetic
PVIGSQAR

SEQ ID NO: 1398 - protein, 15 aa, synthetic construct
  REGION 1..15: note = Synthetic
PVVEVNGVTIQVGSR

SEQ ID NO: 1399 - protein, 20 aa, synthetic construct
  REGION 1..20: note = Synthetic
PWELVVLTARPEDGWTCRGV

SEQ ID NO: 1400 - protein, 13 aa, synthetic construct
  REGION 1..13: note = Synthetic
PWQESRKNKAQTR

SEQ ID NO: 1401 - protein, 15 aa, synthetic construct
  REGION 1..15: note = Synthetic
PYMVNLENSIQNKFS

SEQ ID NO: 1402 - protein, 20 aa, synthetic construct
  REGION 1..20: note = Synthetic
PYMVNLENSIQNKFSAGSYP

SEQ ID NO: 1403 - protein, 10 aa, synthetic construct
  REGION 1..10: note = Synthetic
PYQGSGKGVS

SEQ ID NO: 1404 - protein, 15 aa, synthetic construct
  REGION 1..15: note = Synthetic
PYQVSCGGESDRASA

SEQ ID NO: 1405 - protein, 13 aa, synthetic construct
  REGION 1..13: note = Synthetic
QACKGKIQALCEN

SEQ ID NO: 1406 - protein, 15 aa, synthetic construct
  REGION 1..15: note = Synthetic
QAGQEMILAVQGVQD

SEQ ID NO: 1407 - protein, 15 aa, synthetic construct
  REGION 1..15: note = Synthetic
QALCENPECVPLKDN

SEQ ID NO: 1408 - protein, 7 aa, synthetic construct
  REGION 1..7: note = Synthetic
QALGALK

SEQ ID NO: 1409 - protein, 15 aa, synthetic construct
  REGION 1..15: note = Synthetic
QAPVPVRLAGVRFES

SEQ ID NO: 1410 - protein, 15 aa, synthetic construct
  REGION 1..15: note = Synthetic
QCGTPALVEGLAPGG

SEQ ID NO: 1411 - protein, 15 aa, synthetic construct
  REGION 1..15: note = Synthetic
QDPDKILTYIAADHC

SEQ ID NO: 1412 - protein, 15 aa, synthetic construct
  REGION 1..15: note = Synthetic
QECLRGSTKSCARTL

SEQ ID NO: 1413 - protein, 14 aa, synthetic construct
  REGION 1..14: note = Synthetic
QEQITQHGSPYGRC

SEQ ID NO: 1414 - protein, 13 aa, synthetic construct
  REGION 1..13: note = Synthetic
QESRKNKAQTRTP

SEQ ID NO: 1415 - protein, 15 aa, synthetic construct
  REGION 1..15: note = Synthetic
QGDQSENELPRLGGK

SEQ ID NO: 1416 - protein, 20 aa, synthetic construct
  REGION 1..20: note = Synthetic
QGDQSENELPRLGGKEDRRV

SEQ ID NO: 1417 - protein, 20 aa, synthetic construct
  REGION 1..20: note = Synthetic
QGESGHDIKITAENTPLPIA

SEQ ID NO: 1418 - protein, 15 aa, synthetic construct
  REGION 1..15: note = Synthetic
QGSGKGVSFQLVKLG

SEQ ID NO: 1419 - protein, 15 aa, synthetic construct
  REGION 1..15: note = Synthetic
QGVQDYINNELIPSM

SEQ ID NO: 1420 - protein, 15 aa, synthetic construct
  REGION 1..15: note = Synthetic
QLEVQVPPDPGDLVE

SEQ ID NO: 1421 - protein, 9 aa, synthetic construct
  REGION 1..9: note = Synthetic
QLPEATFMV

SEQ ID NO: 1422 - protein, 25 aa, synthetic construct
  REGION 1..25: note = Synthetic
QLPFLGHDGHHGGTLRVGQHYRNAS

SEQ ID NO: 1423 - protein, 10 aa, synthetic construct
  REGION 1..10: note = Synthetic
QLSMYRVFEV

SEQ ID NO: 1424 - protein, 6 aa, synthetic construct
  REGION 1..6: note = Synthetic
QLSNIT

SEQ ID NO: 1425 - protein, 15 aa, synthetic construct
  REGION 1..15: note = Synthetic
QNIRPVQSVASSRRH

SEQ ID NO: 1426 - protein, 15 aa, synthetic construct
  REGION 1..15: note = Synthetic
QNKFSAGSYPLLWSY

SEQ ID NO: 1427 - protein, 20 aa, synthetic construct
  REGION 1..20: note = Synthetic
QNKFSAGSYPLLWSYAMGVG

SEQ ID NO: 1428 - protein, 25 aa, synthetic construct
  REGION 1..25: note = Synthetic
QNKFSAGSYPLLWSYAMGVGVELEN

SEQ ID NO: 1429 - protein, 15 aa, synthetic construct
  REGION 1..15: note = Synthetic
QQACKGKIQALCENP

SEQ ID NO: 1430 - protein, 15 aa, synthetic construct
  REGION 1..15: note = Synthetic
QQRRVVGEFRLERKW

SEQ ID NO: 1431 - protein, 20 aa, synthetic construct
  REGION 1..20: note = Synthetic
QQRRVVGEFRLERKWLDVVR

SEQ ID NO: 1432 - protein, 18 aa, synthetic construct
  REGION 1..18: note = Synthetic
QQTRANPNPYTSRRSVAS

SEQ ID NO: 1433 - protein, 15 aa, synthetic construct
  REGION 1..15: note = Synthetic
QRHSPDCSRLVGATP

SEQ ID NO: 1434 - protein, 15 aa, synthetic construct
  REGION 1..15: note = Synthetic
QSGLTFASRGTNMED

SEQ ID NO: 1435 - protein, 20 aa, synthetic construct
  REGION 1..20: note = Synthetic
QSGLTFASRGTNMEDEADQY

SEQ ID NO: 1436 - protein, 20 aa, synthetic construct
  REGION 1..20: note = Synthetic
QSIALSSLMVAQAIPLVGEL

SEQ ID NO: 1437 - protein, 15 aa, synthetic construct
  REGION 1..15: note = Synthetic
QSRFGWFENKEISDI

SEQ ID NO: 1438 - protein, 20 aa, synthetic construct
  REGION 1..20: note = Synthetic
QSRFGWFENKEISDIEVQDP

SEQ ID NO: 1439 - protein, 7 aa, synthetic construct
  REGION 1..7: note = Synthetic
QSRGEAR

SEQ ID NO: 1440 - protein, 18 aa, synthetic construct
  REGION 1..18: note = Synthetic
QSRGEARESYRETGPSRA

SEQ ID NO: 1441 - protein, 18 aa, synthetic construct
  REGION 1..18: note = Synthetic
QTGRGGSAPRPELGPPTN

SEQ ID NO: 1442 - protein, 25 aa, synthetic construct
  REGION 1..25: note = Synthetic
QTPAPKPSRAPPQQPQPPRMQTGRG

SEQ ID NO: 1443 - protein, 15 aa, synthetic construct
  REGION 1..15: note = Synthetic
QVGSRRYPDAVYLHR

SEQ ID NO: 1444 - protein, 13 aa, synthetic construct
  REGION 1..13: note = Synthetic
QVSFLQGDQSENE

SEQ ID NO: 1445 - protein, 15 aa, synthetic construct
  REGION 1..15: note = Synthetic
QYHPTACEVEPAFGH

SEQ ID NO: 1446 - protein, 15 aa, synthetic construct
  REGION 1..15: note = Synthetic
QYVLATYDTSRVEHA

SEQ ID NO: 1447 - protein, 13 aa, synthetic construct
  REGION 1..13: note = Synthetic
RANPNPYTSRRSV

SEQ ID NO: 1448 - protein, 13 aa, synthetic construct
  REGION 1..13: note = Synthetic
RASDARAAHLPTG

SEQ ID NO: 1449 - protein, 15 aa, synthetic construct
  REGION 1..15: note = Synthetic
RASLETTNQAIEAIR

SEQ ID NO: 1450 - protein, 20 aa, synthetic construct
  REGION 1..20: note = Synthetic
RCGRLICGLSTTAQYPPTRF

SEQ ID NO: 1451 - protein, 19 aa, synthetic construct
  REGION 1..19: note = Synthetic
RDGQSVIGACASPYEGRYR

SEQ ID NO: 1452 - protein, 13 aa, synthetic construct
  REGION 1..13: note = Synthetic
RESYRETGPSRAS

SEQ ID NO: 1453 - protein, 13 aa, synthetic construct
  REGION 1..13: note = Synthetic
RETGPSRASDARA

SEQ ID NO: 1454 - protein, 14 aa, synthetic construct
  REGION 1..14: note = Synthetic
RFAKYQQQGRLEAR

SEQ ID NO: 1455 - protein, 24 aa, synthetic construct
  REGION 1..24: note = Synthetic
RFGAPQAFLAGLLLATVAVGTARA

SEQ ID NO: 1456 - protein, 15 aa, synthetic construct
  REGION 1..15: note = Synthetic
RFMVALILDIKRTPG

SEQ ID NO: 1457 - protein, 20 aa, synthetic construct
  REGION 1..20: note = Synthetic
RFMVALILDIKRTPGNKPRI

SEQ ID NO: 1458 - protein, 13 aa, synthetic construct
  REGION 1..13: note = Synthetic
RGEARESYRETGP

SEQ ID NO: 1459 - protein, 9 aa, synthetic construct
  REGION 1..9: note = Synthetic
RGTTPPAYG

SEQ ID NO: 1460 - protein, 9 aa, synthetic construct
  REGION 1..9: note = Synthetic
RIETRSARH

SEQ ID NO: 1461 - protein, 11 aa, synthetic construct
  REGION 1..11: note = Synthetic
RILAGALATYQ

SEQ ID NO: 1462 - protein, 11 aa, synthetic construct
  REGION 1..11: note = Synthetic
RIPPENIRRVT

SEQ ID NO: 1463 - protein, 7 aa, synthetic construct
  REGION 1..7: note = Synthetic
RISNLND

SEQ ID NO: 1464 - protein, 7 aa, synthetic construct
  REGION 1..7: note = Synthetic
RLANLNG

SEQ ID NO: 1465 - protein, 15 aa, synthetic construct
  REGION 1..15: note = Synthetic
RLDVGTNLGNAIAKL

SEQ ID NO: 1466 - protein, 9 aa, synthetic construct
  REGION 1..9: note = Synthetic
RLERKWLDV

SEQ ID NO: 1467 - protein, 15 aa, synthetic construct
  REGION 1..15: note = Synthetic
RLGGKEDRRVKQSRG

SEQ ID NO: 1468 - protein, 20 aa, synthetic construct
  REGION 1..20: note = Synthetic
RLGGKEDRRVKQSRGEARES

SEQ ID NO: 1469 - protein, 9 aa, synthetic construct
  REGION 1..9: note = Synthetic
RLLDRLVRL

SEQ ID NO: 1470 - protein, 8 aa, synthetic construct
  REGION 1..8: note = Synthetic
RLRLVDAD

SEQ ID NO: 1471 - protein, 13 aa, synthetic construct
  REGION 1..13: note = Synthetic
RLRLVDADDPLLR

SEQ ID NO: 1472 - protein, 31 aa, synthetic construct
  REGION 1..31: note = Synthetic
RLRLVDADDPLLRTAPGPGEVWVTPVIGSQA

SEQ ID NO: 1473 - protein, 32 aa, synthetic construct
  REGION 1..32: note = Synthetic
RLRLVQDADDPLLRIAPGPGEVWVTPVIGSQA

SEQ ID NO: 1474 - protein, 10 aa, synthetic construct
  REGION 1..10: note = Synthetic
RLSDNGYYTV

SEQ ID NO: 1475 - protein, 8 aa, synthetic construct
  REGION 1..8: note = Synthetic
RLVDADDP

SEQ ID NO: 1476 - protein, 15 aa, synthetic construct
  REGION 1..15: note = Synthetic
RLVDADDPLLRTAPG

SEQ ID NO: 1477 - protein, 8 aa, synthetic construct
  REGION 1..8: note = Synthetic
RLVGATPE

SEQ ID NO: 1478 - protein, 27 aa, synthetic construct
  REGION 1..27: note = Synthetic
RMQTGRGGSAPRPELGPPTNPFQAAVA

SEQ ID NO: 1479 - protein, 9 aa, synthetic construct
  REGION 1..9: note = Synthetic
RMSKGVFKV

SEQ ID NO: 1480 - protein, 15 aa, synthetic construct
  REGION 1..15: note = Synthetic
RNPGLGAPVFHMTNY

SEQ ID NO: 1481 - protein, 8 aa, synthetic construct
  REGION 1..8: note = Synthetic
RPRLRLVD

SEQ ID NO: 1482 - protein, 19 aa, synthetic construct
  REGION 1..19: note = Synthetic
RQAESSEAMAAWSERAGEA

SEQ ID NO: 1483 - protein, 15 aa, synthetic construct
  REGION 1..15: note = Synthetic
RQTWAEWAAAHWWQL

SEQ ID NO: 1484 - protein, 13 aa, synthetic construct
  REGION 1..13: note = Synthetic
RRVKQSRGEARES

SEQ ID NO: 1485 - protein, 9 aa, synthetic construct
  REGION 1..9: note = Synthetic
RRYPDAVYL

SEQ ID NO: 1486 - protein, 15 aa, synthetic construct
  REGION 1..15: note = Synthetic
RRYPDAVYLHRIDLG

SEQ ID NO: 1487 - protein, 15 aa, synthetic construct
  REGION 1..15: note = Synthetic
RSAGKVSSTLASELG

SEQ ID NO: 1488 - protein, 20 aa, synthetic construct
  REGION 1..20: note = Synthetic
RSAGKVSSTLASELGITAED

SEQ ID NO: 1489 - protein, 8 aa, synthetic construct
  REGION 1..8: note = Synthetic
RSELSQLS

SEQ ID NO: 1490 - protein, 15 aa, synthetic construct
  REGION 1..15: note = Synthetic
RSELSQLSMYRVFEV

SEQ ID NO: 1491 - protein, 24 aa, synthetic construct
  REGION 1..24: note = Synthetic
RSQTPAPKPSRAPPQQPQPPRMQT

SEQ ID NO: 1492 - protein, 8 aa, synthetic construct
  REGION 1..8: note = Synthetic
RTAPGPGE

SEQ ID NO: 1493 - protein, 15 aa, synthetic construct
  REGION 1..15: note = Synthetic
RTAPGPGEVWVTPVI

SEQ ID NO: 1494 - protein, 15 aa, synthetic construct
  REGION 1..15: note = Synthetic
RTDDKLRMETCFQQA

SEQ ID NO: 1495 - protein, 15 aa, synthetic construct
  REGION 1..15: note = Synthetic
RTLAPPRNVRVTGCY

SEQ ID NO: 1496 - protein, 15 aa, synthetic construct
  REGION 1..15: note = Synthetic
RTVLEPIRDALNAMT

SEQ ID NO: 1497 - protein, 15 aa, synthetic construct
  REGION 1..15: note = Synthetic
RVEHAVVYYVYSPSR

SEQ ID NO: 1498 - protein, 15 aa, synthetic construct
  REGION 1..15: note = Synthetic
RVFEVGVIRNPGLGA

SEQ ID NO: 1499 - protein, 19 aa, synthetic construct
  REGION 1..19: note = Synthetic
RVHVSKEEQYYDYEDATFE

SEQ ID NO: 1500 - protein, 8 aa, synthetic construct
  REGION 1..8: note = Synthetic
RVIDPAAQ

SEQ ID NO: 1501 - protein, 15 aa, synthetic construct
  REGION 1..15: note = Synthetic
RVKFHTETRTVWQLS

SEQ ID NO: 1502 - protein, 11 aa, synthetic construct
  REGION 1..11: note = Synthetic
RVYHNGITGET

SEQ ID NO: 1503 - protein, 11 aa, synthetic construct
  REGION 1..11: note = Synthetic
RYDSRPPEDVF

SEQ ID NO: 1504 - protein, 15 aa, synthetic construct
  REGION 1..15: note = Synthetic
RYPDAVYLHRIDLGP

SEQ ID NO: 1505 - protein, 15 aa, synthetic construct
  REGION 1..15: note = Synthetic
SAEISIQALSYALGG

SEQ ID NO: 1506 - protein, 15 aa, synthetic construct
  REGION 1..15: note = Synthetic
SAEPLLSCKPWQESR

SEQ ID NO: 1507 - protein, 20 aa, synthetic construct
  REGION 1..20: note = Synthetic
SAEPLLSCKPWQESRKNKAQ

SEQ ID NO: 1508 - protein, 14 aa, synthetic construct
  REGION 1..14: note = Synthetic
SAGKVSSTLASELG

SEQ ID NO: 1509 - protein, 24 aa, synthetic construct
  REGION 1..24: note = Synthetic
SAGKVSSTLASELGITAEDARLVS

SEQ ID NO: 1510 - protein, 10 aa, synthetic construct
  REGION 1..10: note = Synthetic
SCTVTREDGT

SEQ ID NO: 1511 - protein, 15 aa, synthetic construct
  REGION 1..15: note = Synthetic
SDAACWGFPTDTVMS

SEQ ID NO: 1512 - protein, 13 aa, synthetic construct
  REGION 1..13: note = Synthetic
SDARAAHLPTGTP

SEQ ID NO: 1513 - protein, 23 aa, synthetic construct
  REGION 1..23: note = Synthetic
SDWHQGTHVCHTKHMDFWCVEHD

SEQ ID NO: 1514 - protein, 15 aa, synthetic construct
  REGION 1..15: note = Synthetic
SELRRWIKYTQQRRV

SEQ ID NO: 1515 - protein, 20 aa, synthetic construct
  REGION 1..20: note = Synthetic
SELRRWIKYTQQRRVVGEFR

SEQ ID NO: 1516 - protein, 6 aa, synthetic construct
  REGION 1..6: note = Synthetic
SELSQL

SEQ ID NO: 1517 - protein, 7 aa, synthetic construct
  REGION 1..7: note = Synthetic
SELSQLS

SEQ ID NO: 1518 - protein, 20 aa, synthetic construct
  REGION 1..20: note = Synthetic
SEYLAHRRIPPENIRRVTRV

SEQ ID NO: 1519 - protein, 13 aa, synthetic construct
  REGION 1..13: note = Synthetic
SFLQGDQSENELP

SEQ ID NO: 1520 - protein, 15 aa, synthetic construct
  REGION 1..15: note = Synthetic
SGKGVSFQLVKLGVW

SEQ ID NO: 1521 - protein, 15 aa, synthetic construct
  REGION 1..15: note = Synthetic
SHRGVIADNQAKWAV

SEQ ID NO: 1522 - protein, 15 aa, synthetic construct
  REGION 1..15: note = Synthetic
SIEHQVKDVLTPLFK

SEQ ID NO: 1523 - protein, 15 aa, synthetic construct
  REGION 1..15: note = Synthetic
SKIGVVGIGSASYKV

SEQ ID NO: 1524 - protein, 15 aa, synthetic construct
  REGION 1..15: note = Synthetic
SKRSELSQLSMYRVF

SEQ ID NO: 1525 - protein, 21 aa, synthetic construct
  REGION 1..21: note = Synthetic
SLFVESPGQLIQRITDDPDVS

SEQ ID NO: 1526 - protein, 15 aa, synthetic construct
  REGION 1..15: note = Synthetic
SLSTNLDVTNSIEHQ

SEQ ID NO: 1527 - protein, 25 aa, synthetic construct
  REGION 1..25: note = Synthetic
SLSTNLDVTNSIEHQVKDVLTPLFK

SEQ ID NO: 1528 - protein, 10 aa, synthetic construct
  REGION 1..10: note = Synthetic
SLWGSGLLML

SEQ ID NO: 1529 - protein, 15 aa, synthetic construct
  REGION 1..15: note = Synthetic
SMKGLSSTSIVYILI

SEQ ID NO: 1530 - protein, 10 aa, synthetic construct
  REGION 1..10: note = Synthetic
SMYRVFEVGV

SEQ ID NO: 1531 - protein, 15 aa, synthetic construct
  REGION 1..15: note = Synthetic
SNDLSNCMVALGELK

SEQ ID NO: 1532 - protein, 8 aa, synthetic construct
  REGION 1..8: note = Synthetic
SPGQLIQR

SEQ ID NO: 1533 - protein, 13 aa, synthetic construct
  REGION 1..13: note = Synthetic
SQDPQDSRRSAEP

SEQ ID NO: 1534 - protein, 15 aa, synthetic construct
  REGION 1..15: note = Synthetic
SRIVINREHLMIDRP

SEQ ID NO: 1535 - protein, 13 aa, synthetic construct
  REGION 1..13: note = Synthetic
SRKNKAQTRTPLQ

SEQ ID NO: 1536 - protein, 8 aa, synthetic construct
  REGION 1..8: note = Synthetic
SRLVGATP

SEQ ID NO: 1537 - protein, 24 aa, synthetic construct
  REGION 1..24: note = Synthetic
SRLVGATPERPRLRLVDADDPLLR

SEQ ID NO: 1538 - protein, 15 aa, synthetic construct
  REGION 1..15: note = Synthetic
SRPGLKPDLTGTSKS

SEQ ID NO: 1539 - protein, 15 aa, synthetic construct
  REGION 1..15: note = Synthetic
SRRSVASIVGTLVRM

SEQ ID NO: 1540 - protein, 15 aa, synthetic construct
  REGION 1..15: note = Synthetic
SRWGLGSPNCHGPDW

SEQ ID NO: 1541 - protein, 5 aa, synthetic construct
  REGION 1..5: note = Synthetic
SSATK

SEQ ID NO: 1542 - protein, 15 aa, synthetic construct
  REGION 1..15: note = Synthetic
SSGGYAQLASYFNPG

SEQ ID NO: 1543 - protein, 7 aa, synthetic construct
  REGION 1..7: note = Synthetic
SSLGNGV

SEQ ID NO: 1544 - protein, 15 aa, synthetic construct
  REGION 1..15: note = Synthetic
SSNLVILPGQDLQYV

SEQ ID NO: 1545 - protein, 15 aa, synthetic construct
  REGION 1..15: note = Synthetic
SSQDPQDSRRSAEPL

SEQ ID NO: 1546 - protein, 20 aa, synthetic construct
  REGION 1..20: note = Synthetic
SSQDPQDSRRSAEPLLSCKP

SEQ ID NO: 1547 - protein, 15 aa, synthetic construct
  REGION 1..15: note = Synthetic
SSRRHKRFAGVVLAG

SEQ ID NO: 1548 - protein, 15 aa, synthetic construct
  REGION 1..15: note = Synthetic
SSTSIVYILIAVCLG

SEQ ID NO: 1549 - protein, 7 aa, synthetic construct
  REGION 1..7: note = Synthetic
STPGIVI

SEQ ID NO: 1550 - protein, 23 aa, synthetic construct
  REGION 1..23: note = Synthetic
STPGIVIPPQEQITQHGSPYGRC

SEQ ID NO: 1551 - protein, 12 aa, synthetic construct
  REGION 1..12: note = Synthetic
STSSSRRYTEVY

SEQ ID NO: 1552 - protein, 15 aa, synthetic construct
  REGION 1..15: note = Synthetic
SYFIVLSIAYPTLSE

SEQ ID NO: 1553 - protein, 13 aa, synthetic construct
  REGION 1..13: note = Synthetic
SYRETGPSRASDA

SEQ ID NO: 1554 - protein, 4 aa, synthetic construct
  REGION 1..4: note = Synthetic
SYVK

SEQ ID NO: 1555 - protein, 15 aa, synthetic construct
  REGION 1..15: note = Synthetic
SYVQHPHKTVRVKFH

SEQ ID NO: 1556 - protein, 8 aa, synthetic construct
  REGION 1..8: note = Synthetic
TAPGPGEV

SEQ ID NO: 1557 - protein, 14 aa, synthetic construct
  REGION 1..14: note = Synthetic
TATRLLSSTNSRLC

SEQ ID NO: 1558 - protein, 15 aa, synthetic construct
  REGION 1..15: note = Synthetic
TDDPVIDRLYLSSHR

SEQ ID NO: 1559 - protein, 15 aa, synthetic construct
  REGION 1..15: note = Synthetic
TEILSLFGPSLRDPI

SEQ ID NO: 1560 - protein, 15 aa, synthetic construct
  REGION 1..15: note = Synthetic
TETRTVWQLSVAGVS

SEQ ID NO: 1561 - protein, 14 aa, synthetic construct
  REGION 1..14: note = Synthetic
TEVYLEHRMQEAVE

SEQ ID NO: 1562 - protein, 15 aa, synthetic construct
  REGION 1..15: note = Synthetic
TFMPEGTVCSQNALY

SEQ ID NO: 1563 - protein, 15 aa, synthetic construct
  REGION 1..15: note = Synthetic
TGACICEIPTDVSCE

SEQ ID NO: 1564 - protein, 7 aa, synthetic construct
  REGION 1..7: note = Synthetic
TGDLRAY

SEQ ID NO: 1565 - protein, 15 aa, synthetic construct
  REGION 1..15: note = Synthetic
TGMQSWVPLSTDDPV

SEQ ID NO: 1566 - protein, 15 aa, synthetic construct
  REGION 1..15: note = Synthetic
TGNQQSRWGLGSPNC

SEQ ID NO: 1567 - protein, 13 aa, synthetic construct
  REGION 1..13: note = Synthetic
TGPSRASDARAAH

SEQ ID NO: 1568 - protein, 15 aa, synthetic construct
  REGION 1..15: note = Synthetic
TGTIINQDPDKILTY

SEQ ID NO: 1569 - protein, 15 aa, synthetic construct
  REGION 1..15: note = Synthetic
TGVVYGTHTTAVSET

SEQ ID NO: 1570 - protein, 15 aa, synthetic construct
  REGION 1..15: note = Synthetic
TIRGQFSNMSLSLLD

SEQ ID NO: 1571 - protein, 15 aa, synthetic construct
  REGION 1..15: note = Synthetic
TLGATCALPLAGLLA

SEQ ID NO: 1572 - protein, 9 aa, synthetic construct
  REGION 1..9: note = Synthetic
TLLNNCTRV

SEQ ID NO: 1573 - protein, 12 aa, synthetic construct
  REGION 1..12: note = Synthetic
TLNVPPPPDPGR

SEQ ID NO: 1574 - protein, 22 aa, synthetic construct
  REGION 1..22: note = Synthetic
TLNVPPPPDPGRASTSGTPIKK

SEQ ID NO: 1575 - protein, 15 aa, synthetic construct
  REGION 1..15: note = Synthetic
TMTSQGMYGGTYPVE

SEQ ID NO: 1576 - protein, 15 aa, synthetic construct
  REGION 1..15: note = Synthetic
TNLGNAIAKLEDAKE

SEQ ID NO: 1577 - protein, 15 aa, synthetic construct
  REGION 1..15: note = Synthetic
TNMEDEADQYFSHDD

SEQ ID NO: 1578 - protein, 20 aa, synthetic construct
  REGION 1..20: note = Synthetic
TNMEDEADQYFSHDDPISSD

SEQ ID NO: 1579 - protein, 15 aa, synthetic construct
  REGION 1..15: note = Synthetic
TNPFQAAVARGLRPP

SEQ ID NO: 1580 - protein, 15 aa, synthetic construct
  REGION 1..15: note = Synthetic
TNSIEHQVKDVLTPL

SEQ ID NO: 1581 - protein, 15 aa, synthetic construct
  REGION 1..15: note = Synthetic
TNYLEQPVSNDLSNC

SEQ ID NO: 1582 - protein, 27 aa, synthetic construct
  REGION 1..27: note = Synthetic
TNYLEQPVSNDLSNCMVALGELKLAAL

SEQ ID NO: 1583 - protein, 8 aa, synthetic construct
  REGION 1..8: note = Synthetic
TPERPRLR

SEQ ID NO: 1584 - protein, 20 aa, synthetic construct
  REGION 1..20: note = Synthetic
TPERPRLRLVDADDPLLRTA

SEQ ID NO: 1585 - protein, 9 aa, synthetic construct
  REGION 1..9: note = Synthetic
TPGNKPRIA

SEQ ID NO: 1586 - protein, 15 aa, synthetic construct
  REGION 1..15: note = Synthetic
TPLDIDTASESSQDP

SEQ ID NO: 1587 - protein, 20 aa, synthetic construct
  REGION 1..20: note = Synthetic
TPLDIDTASESSQDPQDSRR

SEQ ID NO: 1588 - protein, 15 aa, synthetic construct
  REGION 1..15: note = Synthetic
TPLFKIIGDEVGLRT

SEQ ID NO: 1589 - protein, 7 aa, synthetic construct
  REGION 1..7: note = Synthetic
TPLQCTM

SEQ ID NO: 1590 - protein, 8 aa, synthetic construct
  REGION 1..8: note = Synthetic
TPVIGSQA

SEQ ID NO: 1591 - protein, 10 aa, synthetic construct
  REGION 1..10: note = Synthetic
TPVIGSQARK

SEQ ID NO: 1592 - protein, 15 aa, synthetic construct
  REGION 1..15: note = Synthetic
TQGYLISNFDESSCT

SEQ ID NO: 1593 - protein, 24 aa, synthetic construct
  REGION 1..24: note = Synthetic
TRANPNPYTSRRSVASIVGTLVRM

SEQ ID NO: 1594 - protein, 13 aa, synthetic construct
  REGION 1..13: note = Synthetic
TRFGCAMRWGLPP

SEQ ID NO: 1595 - protein, 16 aa, synthetic construct
  REGION 1..16: note = Synthetic
TRNTGQPATDHYYSNV

SEQ ID NO: 1596 - protein, 13 aa, synthetic construct
  REGION 1..13: note = Synthetic
TRTPLQCTMTEIF

SEQ ID NO: 1597 - protein, 12 aa, synthetic construct
  REGION 1..12: note = Synthetic
TRWHRLLRMPVR

SEQ ID NO: 1598 - protein, 15 aa, synthetic construct
  REGION 1..15: note = Synthetic
TSGSGGAIRGIKHII

SEQ ID NO: 1599 - protein, 20 aa, synthetic construct
  REGION 1..20: note = Synthetic
TSGSGGAIRGIKHIIIVPIP

SEQ ID NO: 1600 - protein, 15 aa, synthetic construct
  REGION 1..15: note = Synthetic
TSQGMYGGTYLVEKP

SEQ ID NO: 1601 - protein, 15 aa, synthetic construct
  REGION 1..15: note = Synthetic
TSRVEHAVVYYVYSP

SEQ ID NO: 1602 - protein, 12 aa, synthetic construct
  REGION 1..12: note = Synthetic
TSSSRRYTEVYL

SEQ ID NO: 1603 - protein, 5 aa, synthetic construct
  REGION 1..5: note = Synthetic
TSYVG

SEQ ID NO: 1604 - protein, 15 aa, synthetic construct
  REGION 1..15: note = Synthetic
TTEDKISRAVGPRQA

SEQ ID NO: 1605 - protein, 20 aa, synthetic construct
  REGION 1..20: note = Synthetic
TTEDKISRAVGPRQAQVSFL

SEQ ID NO: 1606 - protein, 13 aa, synthetic construct
  REGION 1..13: note = Synthetic
TTERIETRSARHP

SEQ ID NO: 1607 - protein, 15 aa, synthetic construct
  REGION 1..15: note = Synthetic
TTNQAIEAIRQAGQE

SEQ ID NO: 1608 - protein, 15 aa, synthetic construct
  REGION 1..15: note = Synthetic
TTSDPWHPPGPLGLK

SEQ ID NO: 1609 - protein, 15 aa, synthetic construct
  REGION 1..15: note = Synthetic
TVCSQNALYPMSPLL

SEQ ID NO: 1610 - protein, 15 aa, synthetic construct
  REGION 1..15: note = Synthetic
TVNGEDVGAVPPGKF

SEQ ID NO: 1611 - protein, 15 aa, synthetic construct
  REGION 1..15: note = Synthetic
TYPVEKPNLSSKRSE

SEQ ID NO: 1612 - protein, 15 aa, synthetic construct
  REGION 1..15: note = Synthetic
VAGVSCNVTTEHPFC

SEQ ID NO: 1613 - protein, 23 aa, synthetic construct
  REGION 1..23: note = Synthetic
VAPGIVIPPKALFTQQGGAYGRC

SEQ ID NO: 1614 - protein, 25 aa, synthetic construct
  REGION 1..25: note = Synthetic
VCHTKHMDFWCVEHDRPPPATPTPL

SEQ ID NO: 1615 - protein, 19 aa, synthetic construct
  REGION 1..19: note = Synthetic
VCQRHSPDCSRLVGATPER

SEQ ID NO: 1616 - protein, 8 aa, synthetic construct
  REGION 1..8: note = Synthetic
VDADDPLL

SEQ ID NO: 1617 - protein, 20 aa, synthetic construct
  REGION 1..20: note = Synthetic
VDADDPLLRTAPGPGEVWVT

SEQ ID NO: 1618 - protein, 20 aa, synthetic construct
  REGION 1..20: note = Synthetic
VDIGFAAYNFVESIINLFQV

SEQ ID NO: 1619 - protein, 15 aa, synthetic construct
  REGION 1..15: note = Synthetic
VEIAEYRRLLRTVLE

SEQ ID NO: 1620 - protein, 15 aa, synthetic construct
  REGION 1..15: note = Synthetic
VELENSMGGLNFGRS

SEQ ID NO: 1621 - protein, 20 aa, synthetic construct
  REGION 1..20: note = Synthetic
VELENSMGGLNFGRSYFDPA

SEQ ID NO: 1622 - protein, 15 aa, synthetic construct
  REGION 1..15: note = Synthetic
VELKIKIASGFGPLI

SEQ ID NO: 1623 - protein, 14 aa, synthetic construct
  REGION 1..14: note = Synthetic
VEMDEWIHAHTTSD

SEQ ID NO: 1624 - protein, 15 aa, synthetic construct
  REGION 1..15: note = Synthetic
VEMPEWIHAHTTSDP

SEQ ID NO: 1625 - protein, 9 aa, synthetic construct
  REGION 1..9: note = Synthetic
VERRLVKVL

SEQ ID NO: 1626 - protein, 8 aa, synthetic construct
  REGION 1..8: note = Synthetic
VESPGQLI

SEQ ID NO: 1627 - protein, 15 aa, synthetic construct
  REGION 1..15: note = Synthetic
VESPGQLIQRITDDP

SEQ ID NO: 1628 - protein, 20 aa, synthetic construct
  REGION 1..20: note = Synthetic
VESPGQLIQRITDDPDVSIR

SEQ ID NO: 1629 - protein, 15 aa, synthetic construct
  REGION 1..15: note = Synthetic
VFALASYVQHPHKTV

SEQ ID NO: 1630 - protein, 8 aa, synthetic construct
  REGION 1..8: note = Synthetic
VGATPERP

SEQ ID NO: 1631 - protein, 10 aa, synthetic construct
  REGION 1..10: note = Synthetic
VGATPERPRL

SEQ ID NO: 1632 - protein, 15 aa, synthetic construct
  REGION 1..15: note = Synthetic
VGATPERPRLRLVDA

SEQ ID NO: 1633 - protein, 15 aa, synthetic construct
  REGION 1..15: note = Synthetic
VGIGSASYKVMTRSS

SEQ ID NO: 1634 - protein, 15 aa, synthetic construct
  REGION 1..15: note = Synthetic
VGLRTPQRFTDLVKF

SEQ ID NO: 1635 - protein, 20 aa, synthetic construct
  REGION 1..20: note = Synthetic
VHHNTEEIVAQSIALSSLMV

SEQ ID NO: 1636 - protein, 15 aa, synthetic construct
  REGION 1..15: note = Synthetic
VHRLEGVSYNIGSQE

SEQ ID NO: 1637 - protein, 8 aa, synthetic construct
  REGION 1..8: note = Synthetic
VIGSQARK

SEQ ID NO: 1638 - protein, 6 aa, synthetic construct
  REGION 1..6: note = Synthetic
VITGSI

SEQ ID NO: 1639 - protein, 6 aa, synthetic construct
  REGION 1..6: note = Synthetic
VITGTI

SEQ ID NO: 1640 - protein, 8 aa, synthetic construct
  REGION 1..8: note = Synthetic
VKQSRGEA

SEQ ID NO: 1641 - protein, 10 aa, synthetic construct
  REGION 1..10: note = Synthetic
VLFVMFLSLI

SEQ ID NO: 1642 - protein, 15 aa, synthetic construct
  REGION 1..15: note = Synthetic
VLFVMFLSLIGLLAI

SEQ ID NO: 1643 - protein, 15 aa, synthetic construct
  REGION 1..15: note = Synthetic
VLTPLFKIIGDEVGL

SEQ ID NO: 1644 - protein, 15 aa, synthetic construct
  REGION 1..15: note = Synthetic
VMTRSSHQSLVIKLM

SEQ ID NO: 1645 - protein, 15 aa, synthetic construct
  REGION 1..15: note = Synthetic
VPAAPCARIWNGTQR

SEQ ID NO: 1646 - protein, 15 aa, synthetic construct
  REGION 1..15: note = Synthetic
VPPDPGDLVEYIMNY

SEQ ID NO: 1647 - protein, 15 aa, synthetic construct
  REGION 1..15: note = Synthetic
VQSVASSRRHKRFAG

SEQ ID NO: 1648 - protein, 17 aa, synthetic construct
  REGION 1..17: note = Synthetic
VQTGGTSRTVTMRYLAS

SEQ ID NO: 1649 - protein, 5 aa, synthetic construct
  REGION 1..5: note = Synthetic
VQVRI

SEQ ID NO: 1650 - protein, 11 aa, synthetic construct
  REGION 1..11: note = Synthetic
VRAYNQPAGDV

SEQ ID NO: 1651 - protein, 15 aa, synthetic construct
  REGION 1..15: note = Synthetic
VRFESKIVDGGCFAP

SEQ ID NO: 1652 - protein, 15 aa, synthetic construct
  REGION 1..15: note = Synthetic
VRLAGVRFESKIVDG

SEQ ID NO: 1653 - protein, 15 aa, synthetic construct
  REGION 1..15: note = Synthetic
VSGSFGNRFILSQGN

SEQ ID NO: 1654 - protein, 14 aa, synthetic construct
  REGION 1..14: note = Synthetic
VSKEEQYYDYEDAT

SEQ ID NO: 1655 - protein, 15 aa, synthetic construct
  REGION 1..15: note = Synthetic
VSKGNCSGPTTIRGQ

SEQ ID NO: 1656 - protein, 15 aa, synthetic construct
  REGION 1..15: note = Synthetic
VTAALLNTPPPYQVS

SEQ ID NO: 1657 - protein, 15 aa, synthetic construct
  REGION 1..15: note = Synthetic
VTGCYQCGTPALVEG

SEQ ID NO: 1658 - protein, 8 aa, synthetic construct
  REGION 1..8: note = Synthetic
VTPVIGSQ

SEQ ID NO: 1659 - protein, 22 aa, synthetic construct
  REGION 1..22: note = Synthetic
VTTEHPFCNTPHGQLEVQVPPD

SEQ ID NO: 1660 - protein, 15 aa, synthetic construct
  REGION 1..15: note = Synthetic
VVLAGAALGVATAAQ

SEQ ID NO: 1661 - protein, 15 aa, synthetic construct
  REGION 1..15: note = Synthetic
VWQLSVAGVSCNVTT

SEQ ID NO: 1662 - protein, 8 aa, synthetic construct
  REGION 1..8: note = Synthetic
VWVTPVIG

SEQ ID NO: 1663 - protein, 12 aa, synthetic construct
  REGION 1..12: note = Synthetic
VWVTPVIGSQAR

SEQ ID NO: 1664 - protein, 15 aa, synthetic construct
  REGION 1..15: note = Synthetic
VYILIAVCLGGLIGI

SEQ ID NO: 1665 - protein, 15 aa, synthetic construct
  REGION 1..15: note = Synthetic
VYLHRIDLGPPISLE

SEQ ID NO: 1666 - protein, 8 aa, synthetic construct
  REGION 1..8: note = Synthetic
VYRYDSRP

SEQ ID NO: 1667 - protein, 12 aa, synthetic construct
  REGION 1..12: note = Synthetic
VYRYDSRPPEDV

SEQ ID NO: 1668 - protein, 15 aa, synthetic construct
  REGION 1..15: note = Synthetic
VYWLTIPPMKNLALG

SEQ ID NO: 1669 - protein, 15 aa, synthetic construct
  REGION 1..15: note = Synthetic
WDLEATGACICEIPT

SEQ ID NO: 1670 - protein, 15 aa, synthetic construct
  REGION 1..15: note = Synthetic
WDQKLWCRHFCVLAD

SEQ ID NO: 1671 - protein, 15 aa, synthetic construct
  REGION 1..15: note = Synthetic
WGFPTDTVMSVFALA

SEQ ID NO: 1672 - protein, 15 aa, synthetic construct
  REGION 1..15: note = Synthetic
WHPPGPLGLKFKTVR

SEQ ID NO: 1673 - protein, 15 aa, synthetic construct
  REGION 1..15: note = Synthetic
WIHAHTTSDPWHPPG

SEQ ID NO: 1674 - protein, 15 aa, synthetic construct
  REGION 1..15: note = Synthetic
WLTIPPMKNLALGVI

SEQ ID NO: 1675 - protein, 20 aa, synthetic construct
  REGION 1..20: note = Synthetic
WQESRKNKAQTRTPLQCTMT

SEQ ID NO: 1676 - protein, 13 aa, synthetic construct
  REGION 1..13: note = Synthetic
WVCIFMVCRRACR

SEQ ID NO: 1677 - protein, 8 aa, synthetic construct
  REGION 1..8: note = Synthetic
WVTPVIGS

SEQ ID NO: 1678 - protein, 15 aa, synthetic construct
  REGION 1..15: note = Synthetic
WYTTVPKYVATQGYL

SEQ ID NO: 1679 - protein, 15 aa, synthetic construct
  REGION 1..15: note = Synthetic
YALGGDINKVLEKLG

SEQ ID NO: 1680 - protein, 10 aa, synthetic construct
  REGION 1..10: note = Synthetic
YAMGVGVELE

SEQ ID NO: 1681 - protein, 11 aa, synthetic construct
  REGION 1..11: note = Synthetic
YAMGVGVELEN

SEQ ID NO: 1682 - protein, 15 aa, synthetic construct
  REGION 1..15: note = Synthetic
YCADVAAEELMNALV

SEQ ID NO: 1683 - protein, 15 aa, synthetic construct
  REGION 1..15: note = Synthetic
YDFRDLTWCINPPER

SEQ ID NO: 1684 - protein, 7 aa, synthetic construct
  REGION 1..7: note = Synthetic
YFEPGPT

SEQ ID NO: 1685 - protein, 15 aa, synthetic construct
  REGION 1..15: note = Synthetic
YFNPGGSYYKQYHPT

SEQ ID NO: 1686 - protein, 15 aa, synthetic construct
  REGION 1..15: note = Synthetic
YFRLGQEMVRRSAGK

SEQ ID NO: 1687 - protein, 20 aa, synthetic construct
  REGION 1..20: note = Synthetic
YFRLGQEMVRRSAGKVSSTL

SEQ ID NO: 1688 - protein, 15 aa, synthetic construct
  REGION 1..15: note = Synthetic
YFYPFRLPIKGVPIE

SEQ ID NO: 1689 - protein, 15 aa, synthetic construct
  REGION 1..15: note = Synthetic
YGDNAGRILAGALAT

SEQ ID NO: 1690 - protein, 15 aa, synthetic construct
  REGION 1..15: note = Synthetic
YGHATVEMPEWIHAH

SEQ ID NO: 1691 - protein, 15 aa, synthetic construct
  REGION 1..15: note = Synthetic
YIMNYTGNQQSRWGL

SEQ ID NO: 1692 - protein, 15 aa, synthetic construct
  REGION 1..15: note = Synthetic
YINNELIPSMNQLSC

SEQ ID NO: 1693 - protein, 15 aa, synthetic construct
  REGION 1..15: note = Synthetic
YLCTAPGCATQAPVP

SEQ ID NO: 1694 - protein, 15 aa, synthetic construct
  REGION 1..15: note = Synthetic
YLFTVPIKEAGEDCH

SEQ ID NO: 1695 - protein, 9 aa, synthetic construct
  REGION 1..9: note = Synthetic
YLHDPEFNL

SEQ ID NO: 1696 - protein, 9 aa, synthetic construct
  REGION 1..9: note = Synthetic
YLNMSRLFV

SEQ ID NO: 1697 - protein, 9 aa, synthetic construct
  REGION 1..9: note = Synthetic
YPALGLHEF

SEQ ID NO: 1698 - protein, 10 aa, synthetic construct
  REGION 1..10: note = Synthetic
YPALGLHEFA

SEQ ID NO: 1699 - protein, 15 aa, synthetic construct
  REGION 1..15: note = Synthetic
YPALGLHEFAGELST

SEQ ID NO: 1700 - protein, 20 aa, synthetic construct
  REGION 1..20: note = Synthetic
YPALGLHEFAGELSTLESLM

SEQ ID NO: 1701 - protein, 15 aa, synthetic construct
  REGION 1..15: note = Synthetic
YPFRLPIKGVPIELQ

SEQ ID NO: 1702 - protein, 9 aa, synthetic construct
  REGION 1..9: note = Synthetic
YPLLWSYAM

SEQ ID NO: 1703 - protein, 7 aa, synthetic construct
  REGION 1..7: note = Synthetic
YQQQGRL

SEQ ID NO: 1704 - protein, 10 aa, synthetic construct
  REGION 1..10: note = Synthetic
YQSEYLAHRR

SEQ ID NO: 1705 - protein, 15 aa, synthetic construct
  REGION 1..15: note = Synthetic
YRETGPSRASDARAA

SEQ ID NO: 1706 - protein, 20 aa, synthetic construct
  REGION 1..20: note = Synthetic
YRETGPSRASDARAAHLPTG

SEQ ID NO: 1707 - protein, 25 aa, synthetic construct
  REGION 1..25: note = Synthetic
YRNASDVLPGHWLQGGWGCYNLSDW

SEQ ID NO: 1708 - protein, 15 aa, synthetic construct
  REGION 1..15: note = Synthetic
YRRLLRTVLEPIRDA

SEQ ID NO: 1709 - protein, 8 aa, synthetic construct
  REGION 1..8: note = Synthetic
YRYDSRPP

SEQ ID NO: 1710 - protein, 15 aa, synthetic construct
  REGION 1..15: note = Synthetic
YSGGDLLGILESRGI

SEQ ID NO: 1711 - protein, 25 aa, synthetic construct
  REGION 1..25: note = Synthetic
YSKVTATBLLASTNSRLCAVFVRDG

SEQ ID NO: 1712 - protein, 15 aa, synthetic construct
  REGION 1..15: note = Synthetic
YSPSRSFSYFYPFRL

SEQ ID NO: 1713 - protein, 25 aa, synthetic construct
  REGION 1..25: note = Synthetic
YTGNQQSRWGLGSPNCHGPDWASPV

SEQ ID NO: 1714 - protein, 9 aa, synthetic construct
  REGION 1..9: note = Synthetic
YVLLAVLFV

SEQ ID NO: 1715 - protein, 15 aa, synthetic construct
  REGION 1..15: note = Synthetic
YVYSPGRSFSYFYPF

SEQ ID NO: 1716 - protein, 27 aa, synthetic construct
  REGION 1..27: note = Synthetic
YYDYEDATFQTYALTGISLCNPAASIC

SEQ ID NO: 1717 - protein, 15 aa, synthetic construct
  REGION 1..15: note = Synthetic
GDLLGILESRGIKAR

SEQ ID NO: 1718 - protein, 15 aa, synthetic construct
  REGION 1..15: note = Synthetic
TVPKYVATQGYLISN

SEQ ID NO: 1719 - protein, 9 aa, synthetic construct
  REGION 1..9: note = Synthetic
KPWDSPQEI

SEQ ID NO: 1720 - protein, 9 aa, synthetic construct
  REGION 1..9: note = Synthetic
KPWESPQEI

SEQ ID NO: 1721 - protein, 15 aa, synthetic construct
  REGION 1..15: note = Synthetic
ATYQSEYLAHRRIPP

SEQ ID NO: 1722 - protein, 35 aa, synthetic construct
  REGION 1..35: note = Synthetic
CMARQAESSEAMAAWSERAGEAMVLVYYESIAYSF

SEQ ID NO: 1723 - protein, 24 aa, synthetic construct
  REGION 1..24: note = Synthetic
CQVGSSNSAFVSTSSSRRYTEVYL

SEQ ID NO: 1724 - protein, 15 aa, synthetic construct
  REGION 1..15: note = Synthetic
DDPPATVYRYDSRPP

SEQ ID NO: 1725 - protein, 18 aa, synthetic construct
  REGION 1..18: note = Synthetic
GALATYQSEYLAHRRIPP

SEQ ID NO: 1726 - protein, 24 aa, synthetic construct
  REGION 1..24: note = Synthetic
MAAWSERAGEAMVLVYYESIAYSF

SEQ ID NO: 1727 - protein, 13 aa, synthetic construct
  REGION 1..13: note = Synthetic
MVLVYYESIAYSF

SEQ ID NO: 1728 - protein, 15 aa, synthetic construct
  REGION 1..15: note = Synthetic
PATVYRYDSRPPEDV

SEQ ID NO: 1729 - protein, 9 aa, synthetic construct
  REGION 1..9: note = Synthetic
YDSRPPEDV

SEQ ID NO: 1730 - protein, 10 aa, synthetic construct
  REGION 1..10: note = Synthetic
EPGITTNYDT

SEQ ID NO: 1731 - protein, 20 aa, synthetic construct
  REGION 1..20: note = Synthetic
GDLRAYKMVYATNPQTQLSN

SEQ ID NO: 1732 - protein, 21 aa, synthetic construct
  REGION 1..21: note = Synthetic
KNGDVEASAITTYVGFSVVYP

SEQ ID NO: 1733 - protein, 19 aa, synthetic construct
  REGION 1..19: note = Synthetic
KVTNGSKSYTLRYLASYVK

SEQ ID NO: 1734 - protein, 35 aa, synthetic construct
  REGION 1..35: note = Synthetic
QALGALKLYFEPGITTNYDTGDLIAYKQTYNASGN

SEQ ID NO: 1735 - protein, 10 aa, synthetic construct
  REGION 1..10: note = Synthetic
YATNPQTQLS

SEQ ID NO: 1736 - protein, 24 aa, synthetic construct
  REGION 1..24: note = Synthetic
DNENPLSGKAGGVVKVTYPGLTKV

SEQ ID NO: 1737 - protein, 17 aa, synthetic construct
  REGION 1..17: note = Synthetic
ENFSSYHGTKPGYVDSI

SEQ ID NO: 1738 - protein, 19 aa, synthetic construct
  REGION 1..19: note = Synthetic
KVDNAETIKKELGLSLTEP

SEQ ID NO: 1739 - protein, 21 aa, synthetic construct
  REGION 1..21: note = Synthetic
MEDLQKALEAQSRALRAGLAA

SEQ ID NO: 1740 - protein, 23 aa, synthetic construct
  REGION 1..23: note = Synthetic
QKGIQKPKSGTQGNYDDDWKGFY

SEQ ID NO: 1741 - protein, 34 aa, synthetic construct
  REGION 1..34: note = Synthetic
RTGAWQRKDWSRAPPPPEERQESRSQTPAPKPSR

SEQ ID NO: 1742 - protein, 29 aa, synthetic construct
  REGION 1..29: note = Synthetic
AAGASQSRRPRPPRHARAQHLPEMTPAVT

SEQ ID NO: 1743 - protein, 28 aa, synthetic construct
  REGION 1..28: note = Synthetic
CVTSWLWSEGEGAVFYRVDLHFINLGTP

SEQ ID NO: 1744 - protein, 27 aa, synthetic construct
  REGION 1..27: note = Synthetic
FRVGGTRWHRLLRMPVRGLDGDTAPLP

SEQ ID NO: 1745 - protein, 28 aa, synthetic construct
  REGION 1..28: note = Synthetic
GRKIRMRCRAIDGDVTFCRPKSPVYVGN

SEQ ID NO: 1746 - protein, 28 aa, synthetic construct
  REGION 1..28: note = Synthetic
GTPPLDEDGRWDPALMYNPCGPEPPAHV

SEQ ID NO: 1747 - protein, 54 aa, synthetic construct
  REGION 1..54: note = Synthetic
GVHANLHVAFHRSSSEKIHSNEISSDSIGVLGYQKTVDHTKVNSKLSLFFEIKS

SEQ ID NO: 1748 - protein, 30 aa, synthetic construct
  REGION 1..30: note = Synthetic
MASTTPITMEDLQKALEAQSRALRAGLAAG

SEQ ID NO: 1749 - protein, 34 aa, synthetic construct
  REGION 1..34: note = Synthetic
PELGPPTNPFQAAVARGLRPPLHDPDTEAPTEAC

SEQ ID NO: 1750 - protein, 26 aa, synthetic construct
  REGION 1..26: note = Synthetic
PLPPHTTERIETRSARHPWRIRFGAP

SEQ ID NO: 1751 - protein, 27 aa, synthetic construct
  REGION 1..27: note = Synthetic
SRAPPPPEERQESRSQTPAPKPSRAPP

SEQ ID NO: 1752 - protein, 28 aa, synthetic construct
  REGION 1..28: note = Synthetic
SRAPPQQPQPPRMQTGRGGSAPRPELGP

SEQ ID NO: 1753 - protein, 27 aa, synthetic construct
  REGION 1..27: note = Synthetic
TPAVTPEGPAPPRTGAWQRKDWSRAPP

SEQ ID NO: 1754 - protein, 29 aa, synthetic construct
  REGION 1..29: note = Synthetic
VRAYNQPAGDVRGVWGKGERTYAEQDFRV

SEQ ID NO: 1755 - protein, 20 aa, synthetic construct
  REGION 1..20: note = Synthetic
AFGHSDAACWGFPTDTVMSV

SEQ ID NO: 1756 - protein, 21 aa, synthetic construct
  REGION 1..21: note = Synthetic
CARIWNGTQRACTFWAVNAYS

SEQ ID NO: 1757 - protein, 22 aa, synthetic construct
  REGION 1..22: note = Synthetic
EEAFTYLCTAPGCATQTPVPVR

SEQ ID NO: 1758 - protein, 20 aa, synthetic construct
  REGION 1..20: note = Synthetic
FAPWDLEATGACICEIPTDV

SEQ ID NO: 1759 - protein, 17 aa, synthetic construct
  REGION 1..17: note = Synthetic
GEDVGAFPPGKFVTAAL

SEQ ID NO: 1760 - protein, 20 aa, synthetic construct
  REGION 1..20: note = Synthetic
GEVWVTPVIGSQARKCGLHI

SEQ ID NO: 1761 - protein, 20 aa, synthetic construct
  REGION 1..20: note = Synthetic
GQLEVQVPPDPGDLVEYIMN

SEQ ID NO: 1762 - protein, 20 aa, synthetic construct
  REGION 1..20: note = Synthetic
GSYYKQYHPTACEVEPAFGH

SEQ ID NO: 1763 - protein, 20 aa, synthetic construct
  REGION 1..20: note = Synthetic
IHAHTTSDPWHPPGPLGLKF

SEQ ID NO: 1764 - protein, 20 aa, synthetic construct
  REGION 1..20: note = Synthetic
IMNYTGNQQSRWGLGSPNCH

SEQ ID NO: 1765 - protein, 20 aa, synthetic construct
  REGION 1..20: note = Synthetic
LHIRAGPYGHATVEMPEWIH

SEQ ID NO: 1766 - protein, 20 aa, synthetic construct
  REGION 1..20: note = Synthetic
LKFKTVRPVALPRALAPPRN

SEQ ID NO: 1767 - protein, 22 aa, synthetic construct
  REGION 1..22: note = Synthetic
LNTPPPYQVSCGGESDRASAGH

SEQ ID NO: 1768 - protein, 20 aa, synthetic construct
  REGION 1..20: note = Synthetic
NCHGPDWASPVCQRHSPDCS

SEQ ID NO: 1769 - protein, 20 aa, synthetic construct
  REGION 1..20: note = Synthetic
PDCSRLVGATPERPRLRLVD

SEQ ID NO: 1770 - protein, 20 aa, synthetic construct
  REGION 1..20: note = Synthetic
PRNVRVTGCYQCGTPALVEG

SEQ ID NO: 1771 - protein, 21 aa, synthetic construct
  REGION 1..21: note = Synthetic
PTDVSCEGLGAWVPTAPCARI

SEQ ID NO: 1772 - protein, 20 aa, synthetic construct
  REGION 1..20: note = Synthetic
RLVDADDPLLRTAPGPGEVW

SEQ ID NO: 1773 - protein, 20 aa, synthetic construct
  REGION 1..20: note = Synthetic
SVFALASYVQHPHKTVRVKF

SEQ ID NO: 1774 - protein, 20 aa, synthetic construct
  REGION 1..20: note = Synthetic
VEGLAPGGGNCHLTVNGEDV

SEQ ID NO: 1775 - protein, 20 aa, synthetic construct
  REGION 1..20: note = Synthetic
VKFHTETRTVWQLSVAGVSC

SEQ ID NO: 1776 - protein, 20 aa, synthetic construct
  REGION 1..20: note = Synthetic
VPVRLAGVGFESKIVDGGCF

SEQ ID NO: 1777 - protein, 20 aa, synthetic construct
  REGION 1..20: note = Synthetic
VSCNVTTEHPFCNTPHGQLE

SEQ ID NO: 1778 - protein, 12 aa, synthetic construct
  REGION 1..12: note = Synthetic
AAASSPDAHVPF

SEQ ID NO: 1779 - protein, 7 aa, synthetic construct
  REGION 1..7: note = Synthetic
AASSPDA

SEQ ID NO: 1780 - protein, 12 aa, synthetic construct
  REGION 1..12: note = Synthetic
AKLGAAASSPDA

SEQ ID NO: 1781 - protein, 12 aa, synthetic construct
  REGION 1..12: note = Synthetic
AMKPYEVTPTRM

SEQ ID NO: 1782 - protein, 25 aa, synthetic construct
  REGION 1..25: note = Synthetic
AMTHLSPALADVPYVLVKTNMVVTS

SEQ ID NO: 1783 - protein, 12 aa, synthetic construct
  REGION 1..12: note = Synthetic
ASSPDAHVPFCF

SEQ ID NO: 1784 - protein, 25 aa, synthetic construct
  REGION 1..25: note = Synthetic
ASSPDAHVPFCFGKDLKRPGSSPME

SEQ ID NO: 1785 - protein, 12 aa, synthetic construct
  REGION 1..12: note = Synthetic
CFGKDLKRPGSS

SEQ ID NO: 1786 - protein, 25 aa, synthetic construct
  REGION 1..25: note = Synthetic
CFGKDLKRPGSSPMEVMLRAVFMQQ

SEQ ID NO: 1787 - protein, 12 aa, synthetic construct
  REGION 1..12: note = Synthetic
CGIAAKLGAAAS

SEQ ID NO: 1788 - protein, 25 aa, synthetic construct
  REGION 1..25: note = Synthetic
CGIAAKLGAAASSPDAHVPFCFGKD

SEQ ID NO: 1789 - protein, 12 aa, synthetic construct
  REGION 1..12: note = Synthetic
DAHVPFCFGKDL

SEQ ID NO: 1790 - protein, 12 aa, synthetic construct
  REGION 1..12: note = Synthetic
DLKRPGSSPMEV

SEQ ID NO: 1791 - protein, 12 aa, synthetic construct
  REGION 1..12: note = Synthetic
DVPYVLVKTNMV

SEQ ID NO: 1792 - protein, 26 aa, synthetic construct
  REGION 1..26: note = Synthetic
DVPYVLVKTNMVVTSVAMKPYEVTPT

SEQ ID NO: 1793 - protein, 12 aa, synthetic construct
  REGION 1..12: note = Synthetic
EVMLRAVFMQQR

SEQ ID NO: 1794 - protein, 12 aa, synthetic construct
  REGION 1..12: note = Synthetic
FEGKPALELIRM

SEQ ID NO: 1795 - protein, 12 aa, synthetic construct
  REGION 1..12: note = Synthetic
FLGPKQLTFEGK

SEQ ID NO: 1796 - protein, 25 aa, synthetic construct
  REGION 1..25: note = Synthetic
FLGPKQLTFEGKPALELIRMVECSG

SEQ ID NO: 1797 - protein, 17 aa, synthetic construct
  REGION 1..17: note = Synthetic
FMQQRPLRMFLGPKQLT

SEQ ID NO: 1798 - protein, 12 aa, synthetic construct
  REGION 1..12: note = Synthetic
GKDLKRPGSSPM

SEQ ID NO: 1799 - protein, 13 aa, synthetic construct
  REGION 1..13: note = Synthetic
GKDLKRPGSSPME

SEQ ID NO: 1800 - protein, 12 aa, synthetic construct
  REGION 1..12: note = Synthetic
GKPALELIRMVE

SEQ ID NO: 1801 - protein, 12 aa, synthetic construct
  REGION 1..12: note = Synthetic
GPKQLTFEGKPA

SEQ ID NO: 1802 - protein, 12 aa, synthetic construct
  REGION 1..12: note = Synthetic
HVPFCFGKDLKR

SEQ ID NO: 1803 - protein, 12 aa, synthetic construct
  REGION 1..12: note = Synthetic
IAAKLGAAASSP

SEQ ID NO: 1804 - protein, 12 aa, synthetic construct
  REGION 1..12: note = Synthetic
KPYEVTPTRMLV

SEQ ID NO: 1805 - protein, 12 aa, synthetic construct
  REGION 1..12: note = Synthetic
KQLTFEGKPALE

SEQ ID NO: 1806 - protein, 12 aa, synthetic construct
  REGION 1..12: note = Synthetic
KRPGSSPMEVML

SEQ ID NO: 1807 - protein, 12 aa, synthetic construct
  REGION 1..12: note = Synthetic
LELIRMVECSGK

SEQ ID NO: 1808 - protein, 12 aa, synthetic construct
  REGION 1..12: note = Synthetic
LGAAASSPDAHV

SEQ ID NO: 1809 - protein, 12 aa, synthetic construct
  REGION 1..12: note = Synthetic
LIRMVECSGKQD

SEQ ID NO: 1810 - protein, 12 aa, synthetic construct
  REGION 1..12: note = Synthetic
LVCGIAAKLGAA

SEQ ID NO: 1811 - protein, 11 aa, synthetic construct
  REGION 1..11: note = Synthetic
MKPYEVTPTRM

SEQ ID NO: 1812 - protein, 12 aa, synthetic construct
  REGION 1..12: note = Synthetic
MLRAVFMQQRPL

SEQ ID NO: 1813 - protein, 8 aa, synthetic construct
  REGION 1..8: note = Synthetic
MQQRPLRM

SEQ ID NO: 1814 - protein, 12 aa, synthetic construct
  REGION 1..12: note = Synthetic
MQQRPLRMFLGP

SEQ ID NO: 1815 - protein, 12 aa, synthetic construct
  REGION 1..12: note = Synthetic
MVVTSVAMKPYE

SEQ ID NO: 1816 - protein, 25 aa, synthetic construct
  REGION 1..25: note = Synthetic
MVVTSVAMKPYEVTPTRMLVCGIAA

SEQ ID NO: 1817 - protein, 12 aa, synthetic construct
  REGION 1..12: note = Synthetic
PALELIRMVECS

SEQ ID NO: 1818 - protein, 14 aa, synthetic construct
  REGION 1..14: note = Synthetic
PALELIRMVECSGK

SEQ ID NO: 1819 - protein, 12 aa, synthetic construct
  REGION 1..12: note = Synthetic
PFCFGKDLKRPG

SEQ ID NO: 1820 - protein, 12 aa, synthetic construct
  REGION 1..12: note = Synthetic
PGSSPMEVMLRA

SEQ ID NO: 1821 - protein, 14 aa, synthetic construct
  REGION 1..14: note = Synthetic
PGSSPMEVMLRAVF

SEQ ID NO: 1822 - protein, 9 aa, synthetic construct
  REGION 1..9: note = Synthetic
PKQLTFEGK

SEQ ID NO: 1823 - protein, 12 aa, synthetic construct
  REGION 1..12: note = Synthetic
PLRMFLGPKQLT

SEQ ID NO: 1824 - protein, 12 aa, synthetic construct
  REGION 1..12: note = Synthetic
PTRMLVCGIAAK

SEQ ID NO: 1825 - protein, 12 aa, synthetic construct
  REGION 1..12: note = Synthetic
PYVLVKTNMVVT

SEQ ID NO: 1826 - protein, 25 aa, synthetic construct
  REGION 1..25: note = Synthetic
QLTFEGKPALELIRMVECSGKQDCP

SEQ ID NO: 1827 - protein, 12 aa, synthetic construct
  REGION 1..12: note = Synthetic
QRPLRMFLGPKQ

SEQ ID NO: 1828 - protein, 12 aa, synthetic construct
  REGION 1..12: note = Synthetic
RAVFMQQRPLRM

SEQ ID NO: 1829 - protein, 12 aa, synthetic construct
  REGION 1..12: note = Synthetic
RMFLGPKQLTFE

SEQ ID NO: 1830 - protein, 12 aa, synthetic construct
  REGION 1..12: note = Synthetic
RMLVCGIAAKLG

SEQ ID NO: 1831 - protein, 12 aa, synthetic construct
  REGION 1..12: note = Synthetic
RMVECSGKQDCP

SEQ ID NO: 1832 - protein, 12 aa, synthetic construct
  REGION 1..12: note = Synthetic
SPDAHVPFCFGK

SEQ ID NO: 1833 - protein, 12 aa, synthetic construct
  REGION 1..12: note = Synthetic
SSPMEVMLRAVF

SEQ ID NO: 1834 - protein, 25 aa, synthetic construct
  REGION 1..25: note = Synthetic
SSPMEVMLRAVFMQQRPLRMFLGPK

SEQ ID NO: 1835 - protein, 12 aa, synthetic construct
  REGION 1..12: note = Synthetic
SVAMKPYEVTPT

SEQ ID NO: 1836 - protein, 10 aa, synthetic construct
  REGION 1..10: note = Synthetic
VECSGKQDCP

SEQ ID NO: 1837 - protein, 12 aa, synthetic construct
  REGION 1..12: note = Synthetic
VFMQQRPLRMFL

SEQ ID NO: 1838 - protein, 25 aa, synthetic construct
  REGION 1..25: note = Synthetic
VFMQQRPLRMFLGPKQLTFEGKPAL

SEQ ID NO: 1839 - protein, 12 aa, synthetic construct
  REGION 1..12: note = Synthetic
VKTNMVVTSVAM

SEQ ID NO: 1840 - protein, 12 aa, synthetic construct
  REGION 1..12: note = Synthetic
VLVKTNMVVTSV

SEQ ID NO: 1841 - protein, 12 aa, synthetic construct
  REGION 1..12: note = Synthetic
VTPTRMLVCGIA

SEQ ID NO: 1842 - protein, 12 aa, synthetic construct
  REGION 1..12: note = Synthetic
VTSVAMKPYEVT

SEQ ID NO: 1843 - protein, 12 aa, synthetic construct
  REGION 1..12: note = Synthetic
YEVTPTRMLVCG

SEQ ID NO: 1844 - protein, 25 aa, synthetic construct
  REGION 1..25: note = Synthetic
YEVTPTRMLVCGIAAKLGAAASSPD

SEQ ID NO: 1845 - protein, 17 aa, synthetic construct
  REGION 1..17: note = Synthetic
CASPYEGRYRDMYDALR

SEQ ID NO: 1846 - protein, 11 aa, synthetic construct
  REGION 1..11: note = Synthetic
CAVFVRDGQSV

SEQ ID NO: 1847 - protein, 9 aa, synthetic construct
  REGION 1..9: note = Synthetic
CITTIYKTG

SEQ ID NO: 1848 - protein, 10 aa, synthetic construct
  REGION 1..10: note = Synthetic
CPNGTRALTV

SEQ ID NO: 1849 - protein, 14 aa, synthetic construct
  REGION 1..14: note = Synthetic
DALRRLLYMIYMSG

SEQ ID NO: 1850 - protein, 26 aa, synthetic construct
  REGION 1..26: note = Synthetic
GNRGRGQRRDWSRAPPPPEERQETRS

SEQ ID NO: 1851 - protein, 13 aa, synthetic construct
  REGION 1..13: note = Synthetic
GQPAADHYYSKVT

SEQ ID NO: 1852 - protein, 19 aa, synthetic construct
  REGION 1..19: note = Synthetic
GSPNCHGPDWASPVCQRHS

SEQ ID NO: 1853 - protein, 17 aa, synthetic construct
  REGION 1..17: note = Synthetic
HKSLSTNLDVTNSIEHQ

SEQ ID NO: 1854 - protein, 12 aa, synthetic construct
  REGION 1..12: note = Synthetic
LFTQQGGAYGRC

SEQ ID NO: 1855 - protein, 22 aa, synthetic construct
  REGION 1..22: note = Synthetic
LIGLLAIAGIRLHRAAIYTAEI

SEQ ID NO: 1856 - protein, 15 aa, synthetic construct
  REGION 1..15: note = Synthetic
PDTAADSELRRWIKY

SEQ ID NO: 1857 - protein, 17 aa, synthetic construct
  REGION 1..17: note = Synthetic
PNCHGPDWASPVCQRHS

SEQ ID NO: 1858 - protein, 24 aa, synthetic construct
  REGION 1..24: note = Synthetic
QTPAPKPSRAPPQQPQPPRMQTGR

SEQ ID NO: 1859 - protein, 18 aa, synthetic construct
  REGION 1..18: note = Synthetic
RAGLTAGASQSRRPRPPR

SEQ ID NO: 1860 - protein, 24 aa, synthetic construct
  REGION 1..24: note = Synthetic
RFGAPQAFLAGLLLAAVAVGTARA

SEQ ID NO: 1861 - protein, 16 aa, synthetic construct
  REGION 1..16: note = Synthetic
RGNAELQTYLRQITPG

SEQ ID NO: 1862 - protein, 15 aa, synthetic construct
  REGION 1..15: note = Synthetic
RVHVSKEEQYYDYED

SEQ ID NO: 1863 - protein, 11 aa, synthetic construct
  REGION 1..11: note = Synthetic
SIYGLYDGTYL

SEQ ID NO: 1864 - protein, 14 aa, synthetic construct
  REGION 1..14: note = Synthetic
SKVTATRLLASTNS

SEQ ID NO: 1865 - protein, 16 aa, synthetic construct
  REGION 1..16: note = Synthetic
TQQGGAYGRCPNGTRA

SEQ ID NO: 1866 - protein, 12 aa, synthetic construct
  REGION 1..12: note = Synthetic
VAPGIVIPPKAL

SEQ ID NO: 1867 - protein, 17 aa, synthetic construct
  REGION 1..17: note = Synthetic
DSRPPEDVFQNGFTAWG

SEQ ID NO: 1868 - protein, 15 aa, synthetic construct
  REGION 1..15: note = Synthetic
EHRMQEAVEAERAGR

SEQ ID NO: 1869 - protein, 22 aa, synthetic construct
  REGION 1..22: note = Synthetic
ETCFQQACKGKIQALCENPEWA

SEQ ID NO: 1870 - protein, 22 aa, synthetic construct
  REGION 1..22: note = Synthetic
EYVDTYGDNAGRILAGALATYQ

SEQ ID NO: 1871 - protein, 14 aa, synthetic construct
  REGION 1..14: note = Synthetic
HRRIPPENIRRVTR

SEQ ID NO: 1872 - protein, 9 aa, synthetic construct
  REGION 1..9: note = Synthetic
MARQAESSE

SEQ ID NO: 1873 - protein, 12 aa, synthetic construct
  REGION 1..12: note = Synthetic
MQEAVEAERAGR

SEQ ID NO: 1874 - protein, 15 aa, synthetic construct
  REGION 1..15: note = Synthetic
SQQTRANPNPYTSRR

SEQ ID NO: 1875 - protein, 24 aa, synthetic construct
  REGION 1..24: note = Synthetic
TRANPNPYTSRRSVASIVGTLVHG

SEQ ID NO: 1876 - protein, 12 aa, synthetic construct
  REGION 1..12: note = Synthetic
TVYRYDSRPPED

SEQ ID NO: 1877 - protein, 7 aa, synthetic construct
  REGION 1..7: note = Synthetic
NDRNLLD

SEQ ID NO: 1878 - protein, 29 aa, synthetic construct
  REGION 1..29: note = Synthetic
NMEDEADQYFSHDDPISSDQSRFGWFENK

SEQ ID NO: 1879 - protein, 20 aa, synthetic construct
  REGION 1..20: note = Synthetic
SRASDARAAHLPTGTPLDID

SEQ ID NO: 1880 - protein, 11 aa, synthetic construct
  REGION 1..11: note = Synthetic
EDVFQNGFTAW

SEQ ID NO: 1881 - protein, 17 aa, synthetic construct
  REGION 1..17: note = Synthetic
AEGSSSVEYINNWEQAK

SEQ ID NO: 1882 - protein, 14 aa, synthetic construct
  REGION 1..14: note = Synthetic
GPIKNKMSESPNKT

SEQ ID NO: 1883 - protein, 32 aa, synthetic construct
  REGION 1..32: note = Synthetic
GPKLTGALIGILSLFVESPGQLIQRITDDPDV

SEQ ID NO: 1884 - protein, 14 aa, synthetic construct
  REGION 1..14: note = Synthetic
GYQKTVDHTKVNSK

SEQ ID NO: 1885 - protein, 5 aa, synthetic construct
  REGION 1..5: note = Synthetic
KTVDH

SEQ ID NO: 1886 - protein, 6 aa, synthetic construct
  REGION 1..6: note = Synthetic
SESPNK

SEQ ID NO: 1887 - protein, 20 aa, synthetic construct
  REGION 1..20: note = Synthetic
AEGSSSVEYINNWEQAKALS

SEQ ID NO: 1888 - protein, 20 aa, synthetic construct
  REGION 1..20: note = Synthetic
AQAIPLVGELVDIGFAAYNF

SEQ ID NO: 1889 - protein, 20 aa, synthetic construct
  REGION 1..20: note = Synthetic
ASRVVLSLPFAEGSSSVEYI

SEQ ID NO: 1890 - protein, 20 aa, synthetic construct
  REGION 1..20: note = Synthetic
CINLDWDVIRDKTKTKIESL

SEQ ID NO: 1891 - protein, 20 aa, synthetic construct
  REGION 1..20: note = Synthetic
CRAIDGDVTFCRPKSPVYVG

SEQ ID NO: 1892 - protein, 20 aa, synthetic construct
  REGION 1..20: note = Synthetic
CRPKSPVYVGNGVHANLHVA

SEQ ID NO: 1893 - protein, 20 aa, synthetic construct
  REGION 1..20: note = Synthetic
DAAGYSVDNENPLSGKAGGV

SEQ ID NO: 1894 - protein, 20 aa, synthetic construct
  REGION 1..20: note = Synthetic
DKTKTKIESLKEHGPIKNKM

SEQ ID NO: 1895 - protein, 20 aa, synthetic construct
  REGION 1..20: note = Synthetic
EEFIKRFGDGASRVVLSLPF

SEQ ID NO: 1896 - protein, 20 aa, synthetic construct
  REGION 1..20: note = Synthetic
EKAKQYLEEFHQTALEHPEL

SEQ ID NO: 1897 - protein, 20 aa, synthetic construct
  REGION 1..20: note = Synthetic
FHRSSSEKIHSNEISSDSIG

SEQ ID NO: 1898 - protein, 20 aa, synthetic construct
  REGION 1..20: note = Synthetic
GADDVVDSSKSFVMENFSSY

SEQ ID NO: 1899 - protein, 20 aa, synthetic construct
  REGION 1..20: note = Synthetic
GKRGQDAMYEYMAQACAGNR

SEQ ID NO: 1900 - protein, 20 aa, synthetic construct
  REGION 1..20: note = Synthetic
GSVMGIADGAVHHNTEEIVA

SEQ ID NO: 1901 - protein, 20 aa, synthetic construct
  REGION 1..20: note = Synthetic
GTQGNYDDDWKGFYSTDNKY

SEQ ID NO: 1902 - protein, 20 aa, synthetic construct
  REGION 1..20: note = Synthetic
HDGYAVSWNTVEDSIIRTGF

SEQ ID NO: 1903 - protein, 20 aa, synthetic construct
  REGION 1..20: note = Synthetic
HGTKPGYVDSIQKGIQKPKS

SEQ ID NO: 1904 - protein, 20 aa, synthetic construct
  REGION 1..20: note = Synthetic
HQTALEHPELSELKTVTGTN

SEQ ID NO: 1905 - protein, 20 aa, synthetic construct
  REGION 1..20: note = Synthetic
IQKGIQKPKSGTQGNYDDDW

SEQ ID NO: 1906 - protein, 20 aa, synthetic construct
  REGION 1..20: note = Synthetic
KEHGPIKNKMSESPNKTVSE

SEQ ID NO: 1907 - protein, 20 aa, synthetic construct
  REGION 1..20: note = Synthetic
KGFYSTDNKYDAAGYSVDNE

SEQ ID NO: 1908 - protein, 20 aa, synthetic construct
  REGION 1..20: note = Synthetic
LDVNKSKTHISVNGRKIRMR

SEQ ID NO: 1909 - protein, 18 aa, synthetic construct
  REGION 1..18: note = Synthetic
MASTIPITMEDLQKALEA

SEQ ID NO: 1910 - protein, 20 aa, synthetic construct
  REGION 1..20: note = Synthetic
NGVHANLHVAFHRSSSEKIH

SEQ ID NO: 1911 - protein, 20 aa, synthetic construct
  REGION 1..20: note = Synthetic
NNWEQAKALSVELEINFETR

SEQ ID NO: 1912 - protein, 20 aa, synthetic construct
  REGION 1..20: note = Synthetic
NPLSGKAGGVVKVTYPGLTK

SEQ ID NO: 1913 - protein, 20 aa, synthetic construct
  REGION 1..20: note = Synthetic
PVFAGANYAAWAVNVAQVID

SEQ ID NO: 1914 - protein, 20 aa, synthetic construct
  REGION 1..20: note = Synthetic
SELKTVTGTNPVFAGANYAA

SEQ ID NO: 1915 - protein, 20 aa, synthetic construct
  REGION 1..20: note = Synthetic
SESPNKTVSEEKAKQYLEEF

SEQ ID NO: 1916 - protein, 20 aa, synthetic construct
  REGION 1..20: note = Synthetic
SETADNLEKTTAALSILPGI

SEQ ID NO: 1917 - protein, 20 aa, synthetic construct
  REGION 1..20: note = Synthetic
SFVMENFSSYHGTKPGYVDS

SEQ ID NO: 1918 - protein, 20 aa, synthetic construct
  REGION 1..20: note = Synthetic
SNEISSDSIGVLGYQKTVDH

SEQ ID NO: 1919 - protein, 20 aa, synthetic construct
  REGION 1..20: note = Synthetic
SPGHKTQPFLHDGYAVSWNT

SEQ ID NO: 1920 - protein, 20 aa, synthetic construct
  REGION 1..20: note = Synthetic
SVNGRKIRMRCRAIDGDVTF

SEQ ID NO: 1921 - protein, 20 aa, synthetic construct
  REGION 1..20: note = Synthetic
TAALSILPGIGSVMGIADGA

SEQ ID NO: 1922 - protein, 20 aa, synthetic construct
  REGION 1..20: note = Synthetic
TAENTPLPIAGVLLPTIPGK

SEQ ID NO: 1923 - protein, 20 aa, synthetic construct
  REGION 1..20: note = Synthetic
TEPLMEQVGTEEFIKRFGDG

SEQ ID NO: 1924 - protein, 20 aa, synthetic construct
  REGION 1..20: note = Synthetic
TIKKELGLSLTEPLMEQVGT

SEQ ID NO: 1925 - protein, 15 aa, synthetic construct
  REGION 1..15: note = Synthetic
TKVNSKLSLFFEIKS

SEQ ID NO: 1926 - protein, 20 aa, synthetic construct
  REGION 1..20: note = Synthetic
VEDSIIRTGFQGESGHDIKI

SEQ ID NO: 1927 - protein, 20 aa, synthetic construct
  REGION 1..20: note = Synthetic
VELEINFETRGKRGQDAMYE

SEQ ID NO: 1928 - protein, 20 aa, synthetic construct
  REGION 1..20: note = Synthetic
VESIINLFQVVHNSYNRPAY

SEQ ID NO: 1929 - protein, 20 aa, synthetic construct
  REGION 1..20: note = Synthetic
VHNSYNRPAYSPGHKTQPFL

SEQ ID NO: 1930 - protein, 20 aa, synthetic construct
  REGION 1..20: note = Synthetic
VKVTYPGLTKVLALKVDNAE

SEQ ID NO: 1931 - protein, 20 aa, synthetic construct
  REGION 1..20: note = Synthetic
VLALKVDNAETIKKELGLSL

SEQ ID NO: 1932 - protein, 20 aa, synthetic construct
  REGION 1..20: note = Synthetic
VLGYQKTVDHTKVNSKLSLF

SEQ ID NO: 1933 - protein, 20 aa, synthetic construct
  REGION 1..20: note = Synthetic
VRRSVGSSLSCINLDWDVIR

SEQ ID NO: 1934 - protein, 20 aa, synthetic construct
  REGION 1..20: note = Synthetic
WAVNVAQVIDSETADNLEKT

SEQ ID NO: 1935 - protein, 20 aa, synthetic construct
  REGION 1..20: note = Synthetic
YMAQACAGNRVRRSVGSSLS

SEQ ID NO: 1936 - protein, 15 aa, synthetic construct
  REGION 1..15: note = Synthetic
AKAPPAPKPAPQPGP

SEQ ID NO: 1937 - protein, 10 aa, synthetic construct
  REGION 1..10: note = Synthetic
APKPAPQPGP

SEQ ID NO: 1938 - protein, 15 aa, synthetic construct
  REGION 1..15: note = Synthetic
APKPAPQPGPQPPQP

SEQ ID NO: 1939 - protein, 15 aa, synthetic construct
  REGION 1..15: note = Synthetic
AQTRTPLQCTMTEIF

SEQ ID NO: 1940 - protein, 19 aa, synthetic construct
  REGION 1..19: note = Synthetic
ASRGTNMEDEADQYFSHDD

SEQ ID NO: 1941 - protein, 5 aa, synthetic construct
  REGION 1..5: note = Synthetic
ATIRR

SEQ ID NO: 1942 - protein, 5 aa, synthetic construct
  REGION 1..5: note = Synthetic
DNRAG

SEQ ID NO: 1943 - protein, 15 aa, synthetic construct
  REGION 1..15: note = Synthetic
EAPAPQPPAGRELSA

SEQ ID NO: 1944 - protein, 20 aa, synthetic construct
  REGION 1..20: note = Synthetic
EMVRRSAGKVSSTLASELGI

SEQ ID NO: 1945 - protein, 5 aa, synthetic construct
  REGION 1..5: note = Synthetic
GASEL

SEQ ID NO: 1946 - protein, 10 aa, synthetic construct
  REGION 1..10: note = Synthetic
GDALAGGAVP

SEQ ID NO: 1947 - protein, 10 aa, synthetic construct
  REGION 1..10: note = Synthetic
GDAPAGGAVP

SEQ ID NO: 1948 - protein, 7 aa, synthetic construct
  REGION 1..7: note = Synthetic
GDTWDDD

SEQ ID NO: 1949 - protein, 5 aa, synthetic construct
  REGION 1..5: note = Synthetic
GERQH

SEQ ID NO: 1950 - protein, 5 aa, synthetic construct
  REGION 1..5: note = Synthetic
GGAVP

SEQ ID NO: 1951 - protein, 5 aa, synthetic construct
  REGION 1..5: note = Synthetic
GGFGP

SEQ ID NO: 1952 - protein, 10 aa, synthetic construct
  REGION 1..10: note = Synthetic
GGFGPGGFGP

SEQ ID NO: 1953 - protein, 10 aa, synthetic construct
  REGION 1..10: note = Synthetic
GGFGPVLDGW

SEQ ID NO: 1954 - protein, 20 aa, synthetic construct
  REGION 1..20: note = Synthetic
GGKEDRRVKQSRGEARESYR

SEQ ID NO: 1955 - protein, 6 aa, synthetic construct
  REGION 1..6: note = Synthetic
GILLEN

SEQ ID NO: 1956 - protein, 6 aa, synthetic construct
  REGION 1..6: note = Synthetic
GIRRFL

SEQ ID NO: 1957 - protein, 20 aa, synthetic construct
  REGION 1..20: note = Synthetic
HDDPISSDQSRFGWFENKEI

SEQ ID NO: 1958 - protein, 17 aa, synthetic construct
  REGION 1..17: note = Synthetic
HEFAGELSTLESLMNLY

SEQ ID NO: 1959 - protein, 8 aa, synthetic construct
  REGION 1..8: note = Synthetic
HLGGLAGY

SEQ ID NO: 1960 - protein, 21 aa, synthetic construct
  REGION 1..21: note = Synthetic
HTTEDKISRAVGPRQAQVSFL

SEQ ID NO: 1961 - protein, 20 aa, synthetic construct
  REGION 1..20: note = Synthetic
ICDIDTYIVEAGLASFILTI

SEQ ID NO: 1962 - protein, 20 aa, synthetic construct
  REGION 1..20: note = Synthetic
IIIVPIPGDSSITTRSRLLD

SEQ ID NO: 1963 - protein, 20 aa, synthetic construct
  REGION 1..20: note = Synthetic
ILDIKRTPGNKPRIAEMICD

SEQ ID NO: 1964 - protein, 6 aa, synthetic construct
  REGION 1..6: note = Synthetic
KALLYR

SEQ ID NO: 1965 - protein, 20 aa, synthetic construct
  REGION 1..20: note = Synthetic
KPPITSGSGGAIRGIKHIII

SEQ ID NO: 1966 - protein, 6 aa, synthetic construct
  REGION 1..6: note = Synthetic
LAGSGL

SEQ ID NO: 1967 - protein, 20 aa, synthetic construct
  REGION 1..20: note = Synthetic
LGITAEDARLVSEIAMHTTE

SEQ ID NO: 1968 - protein, 18 aa, synthetic construct
  REGION 1..18: note = Synthetic
LGTILAQIWVLLAKAVTA

SEQ ID NO: 1969 - protein, 18 aa, synthetic construct
  REGION 1..18: note = Synthetic
LPTGTPLDIDTASESSQD

SEQ ID NO: 1970 - protein, 17 aa, synthetic construct
  REGION 1..17: note = Synthetic
MATLLRSLALFKRNKDK

SEQ ID NO: 1971 - protein, 6 aa, synthetic construct
  REGION 1..6: note = Synthetic
PAPQPP

SEQ ID NO: 1972 - protein, 20 aa, synthetic construct
  REGION 1..20: note = Synthetic
PDTAADSELRRWIKYTQQRR

SEQ ID NO: 1973 - protein, 20 aa, synthetic construct
  REGION 1..20: note = Synthetic
PKLTGALIGILSLFVESPGQ

SEQ ID NO: 1974 - skipped

SEQ ID NO: 1975 - protein, 5 aa, synthetic construct
  REGION 1..5: note = Synthetic
PQPGP

SEQ ID NO: 1976 - protein, 15 aa, synthetic construct
  REGION 1..15: note = Synthetic
PQPGPQPPQPPQPQP

SEQ ID NO: 1977 - protein, 20 aa, synthetic construct
  REGION 1..20: note = Synthetic
QDPQDSRRSAEPLLSCKPWQ

SEQ ID NO: 1978 - protein, 19 aa, synthetic construct
  REGION 1..19: note = Synthetic
QRRVVGEFRLERKWLDVVR

SEQ ID NO: 1979 - protein, 5 aa, synthetic construct
  REGION 1..5: note = Synthetic
RELSA

SEQ ID NO: 1980 - protein, 5 aa, synthetic construct
  REGION 1..5: note = Synthetic
RFAPQ

SEQ ID NO: 1981 - protein, 20 aa, synthetic construct
  REGION 1..20: note = Synthetic
SIQNKFSAGSYPLLWSYAMG

SEQ ID NO: 1982 - protein, 9 aa, synthetic construct
  REGION 1..9: note = Synthetic
SITLQAGAH

SEQ ID NO: 1983 - protein, 6 aa, synthetic construct
  REGION 1..6: note = Synthetic
SLQPED

SEQ ID NO: 1984 - protein, 8 aa, synthetic construct
  REGION 1..8: note = Synthetic
SNALSKRL

SEQ ID NO: 1985 - protein, 20 aa, synthetic construct
  REGION 1..20: note = Synthetic
SPGQLIQRITDDPDVSIRLL

SEQ ID NO: 1986 - protein, 8 aa, synthetic construct
  REGION 1..8: note = Synthetic
TELPSIPG

SEQ ID NO: 1987 - protein, 7 aa, synthetic construct
  REGION 1..7: note = Synthetic
TFTLANK

SEQ ID NO: 1988 - protein, 5 aa, synthetic construct
  REGION 1..5: note = Synthetic
TWDDD

SEQ ID NO: 1989 - protein, 20 aa, synthetic construct
  REGION 1..20: note = Synthetic
VSFLQGDQSENELPRLGGKE

SEQ ID NO: 1990 - protein, 17 aa, synthetic construct
  REGION 1..17: note = Synthetic
WQESRKNKAQTRTPLQC

SEQ ID NO: 1991 - protein, 20 aa, synthetic construct
  REGION 1..20: note = Synthetic
YAMGVGVELENSMGGLNFGR

SEQ ID NO: 1992 - protein, 18 aa, synthetic construct
  REGION 1..18: note = Synthetic
YQQMGKPAPYMVNLENSI

SEQ ID NO: 1993 - protein, 15 aa, synthetic construct
  REGION 1..15: note = Synthetic
MTRSSHQSLVIKLMP

SEQ ID NO: 1994 - protein, 15 aa, synthetic construct
  REGION 1..15: note = Synthetic
PIRDALNAMTQNIRP

SEQ ID NO: 1995 - protein, 24 aa, synthetic construct
  REGION 1..24: note = Synthetic
ALLNTPPPYQVSCGGESDRASAGH

SEQ ID NO: 1996 - protein, 21 aa, synthetic construct
  REGION 1..21: note = Synthetic
GLGSPNCHGPDWASPVCQRHS

SEQ ID NO: 1997 - protein, 28 aa, synthetic construct
  REGION 1..28: note = Synthetic
GLGSPNCHGPDWASPVCQRHSPDCSRLV

SEQ ID NO: 1998 - protein, 26 aa, synthetic construct
  REGION 1..26: note = Synthetic
NYTGNQQSRWGLGSPNCHGPDWASPV

SEQ ID NO: 1999 - protein, 20 aa, synthetic construct
  REGION 1..20: note = Synthetic
TLPQPPCAHGQHYGHHHHQL

SEQ ID NO: 2000 - protein, 26 aa, synthetic construct
  REGION 1..26: note = Synthetic
TVRVKFHTETRTVWQLSVAGVSCNVT

SEQ ID NO: 2001 - protein, 15 aa, synthetic construct
  REGION 1..15: note = Synthetic
ASYFNPGGSYYKQYH

SEQ ID NO: 2002 - protein, 15 aa, synthetic construct
  REGION 1..15: note = Synthetic
FALASYVQHPHKTVR

SEQ ID NO: 2003 - protein, 21 aa, synthetic construct
  REGION 1..21: note = Synthetic
GGESDRASARVIDPAAQSFTG

SEQ ID NO: 2004 - protein, 18 aa, synthetic construct
  REGION 1..18: note = Synthetic
GPGEVWVTPVIGSQARKC

SEQ ID NO: 2005 - protein, 14 aa, synthetic construct
  REGION 1..14: note = Synthetic
GSQARKCGLHIRAG

SEQ ID NO: 2006 - protein, 25 aa, synthetic construct
  REGION 1..25: note = Synthetic
LVGATPERPRLRLVDADDPLLRTAP

SEQ ID NO: 2007 - protein, 14 aa, synthetic construct
  REGION 1..14: note = Synthetic
TAPGPGEVWVTPVI

SEQ ID NO: 2008 - protein, 15 aa, synthetic construct
  REGION 1..15: note = Synthetic
FIVLSIAYPTLSEIK

SEQ ID NO: 2009 - protein, 32 aa, synthetic construct
  REGION 1..32: note = Synthetic
ETCFQQACKGKIQALCENPEWAPLKDNRIPSY

SEQ ID NO: 2010 - protein, 10 aa, synthetic construct
  REGION 1..10: note = Synthetic
LPRLGGKEDR

SEQ ID NO: 2011 - protein, 10 aa, synthetic construct
  REGION 1..10: note = Synthetic
MSKTEWNASQ

SEQ ID NO: 2012 - protein, 10 aa, synthetic construct
  REGION 1..10: note = Synthetic
SRFGWFENKE

SEQ ID NO: 2013 - protein, 29 aa, synthetic construct
  REGION 1..29: note = Synthetic
EACVTSWLWSEGEGAVFYRVDLHFINLGT

SEQ ID NO: 2014 - protein, 21 aa, synthetic construct
  REGION 1..21: note = Synthetic
MDFWCVEHDRPPPATPTSLTT

SEQ ID NO: 2015 - protein, 25 aa, synthetic construct
  REGION 1..25: note = Synthetic
PFLGHDGHHGGTLRVGQHHRNASDV

SEQ ID NO: 2016 - protein, 21 aa, synthetic construct
  REGION 1..21: note = Synthetic
RVKFHTETRTVWQLSVAGVSC

SEQ ID NO: 2017 - protein, 13 aa, synthetic construct
  REGION 1..13: note = Synthetic
AEEQARHVKNGLE

SEQ ID NO: 2018 - protein, 13 aa, synthetic construct
  REGION 1..13: note = Synthetic
ESPQEISKHQALG

SEQ ID NO: 2019 - protein, 15 aa, synthetic construct
  REGION 1..15: note = Synthetic
GVGVELENSMGGLNF

SEQ ID NO: 2020 - protein, 20 aa, synthetic construct
  REGION 1..20: note = Synthetic
IKGANDLAKFHQMLMKIIMK

SEQ ID NO: 2021 - protein, 14 aa, synthetic construct
  REGION 1..14: note = Synthetic
MSKTLHAQLGFKKT

SEQ ID NO: 2022 - protein, 13 aa, synthetic construct
  REGION 1..13: note = Synthetic
NASGLSRPSPSAH

SEQ ID NO: 2023 - protein, 14 aa, synthetic construct
  REGION 1..14: note = Synthetic
VRVIDPSLGDRKDE

SEQ ID NO: 2024 - protein, 9 aa, synthetic construct
  REGION 1..9: note = Synthetic
DLSDGDLLV

SEQ ID NO: 2025 - protein, 10 aa, synthetic construct
  REGION 1..10: note = Synthetic
EAERAGRGTG

SEQ ID NO: 2026 - protein, 11 aa, synthetic construct
  REGION 1..11: note = Synthetic
YRYDSRPPEDV

SEQ ID NO: 2027 - protein, 10 aa, synthetic construct
  REGION 1..10: note = Synthetic
YVDTYGDNAG

SEQ ID NO: 2028 - protein, 9 aa, synthetic construct
  REGION 1..9: note = Synthetic
SFSYFYPFR

SEQ ID NO: 2029 - protein, 8 aa, synthetic construct
  REGION 1..8: note = Synthetic
DIFIVSPR

SEQ ID NO: 2030 - protein, 37 aa, synthetic construct
  REGION 1..37: note = Synthetic
QDSRRSADALLRLQAMAGISEEQGSDTDTPIVYNDRN

SEQ ID NO: 2031 - protein, 10 aa, synthetic construct
  REGION 1..10: note = Synthetic
SAEALLRLQA

SEQ ID NO: 2032 - protein, 9 aa, synthetic construct
  REGION 1..9: note = Synthetic
RIVINREHL

SEQ ID NO: 2033 - protein, 5 aa, synthetic construct
  REGION 1..5: note = Synthetic
IPRFK

SEQ ID NO: 2034 - protein, 9 aa, synthetic construct
  REGION 1..9: note = Synthetic
AAALSPMEI

SEQ ID NO: 2035 - protein, 10 aa, synthetic construct
  REGION 1..10: note = Synthetic
AAASVVGAPV

SEQ ID NO: 2036 - protein, 9 aa, synthetic construct
  REGION 1..9: note = Synthetic
AALGRQDSI

SEQ ID NO: 2037 - protein, 10 aa, synthetic construct
  REGION 1..10: note = Synthetic
AAQRLVHAIA

SEQ ID NO: 2038 - protein, 8 aa, synthetic construct
  REGION 1..8: note = Synthetic
AAVEAAEL

SEQ ID NO: 2039 - protein, 9 aa, synthetic construct
  REGION 1..9: note = Synthetic
AGANVLNGL

SEQ ID NO: 2040 - protein, 8 aa, synthetic construct
  REGION 1..8: note = Synthetic
AGYANAAD

SEQ ID NO: 2041 - protein, 10 aa, synthetic construct
  REGION 1..10: note = Synthetic
AGYEQFEFRV

SEQ ID NO: 2042 - protein, 9 aa, synthetic construct
  REGION 1..9: note = Synthetic
AITGNADNL

SEQ ID NO: 2043 - protein, 9 aa, synthetic construct
  REGION 1..9: note = Synthetic
AKEKNATLM

SEQ ID NO: 2044 - protein, 8 aa, synthetic construct
  REGION 1..8: note = Synthetic
AKGVFLSL

SEQ ID NO: 2045 - protein, 9 aa, synthetic construct
  REGION 1..9: note = Synthetic
APHEYGFGI

SEQ ID NO: 2046 - protein, 9 aa, synthetic construct
  REGION 1..9: note = Synthetic
ARQGNDLEI

SEQ ID NO: 2047 - protein, 8 aa, synthetic construct
  REGION 1..8: note = Synthetic
ASVVGAPV

SEQ ID NO: 2048 - protein, 8 aa, synthetic construct
  REGION 1..8: note = Synthetic
ATLMFRLV

SEQ ID NO: 2049 - protein, 8 aa, synthetic construct
  REGION 1..8: note = Synthetic
AVAAAQRL

SEQ ID NO: 2050 - protein, 10 aa, synthetic construct
  REGION 1..10: note = Synthetic
DAGANVLNGL

SEQ ID NO: 2051 - protein, 9 aa, synthetic construct
  REGION 1..9: note = Synthetic
DALLAQLYR

SEQ ID NO: 2052 - protein, 10 aa, synthetic construct
  REGION 1..10: note = Synthetic
DANGVLKHSI

SEQ ID NO: 2053 - protein, 9 aa, synthetic construct
  REGION 1..9: note = Synthetic
DGDMNIGVI

SEQ ID NO: 2054 - protein, 9 aa, synthetic construct
  REGION 1..9: note = Synthetic
DHVKNIENL

SEQ ID NO: 2055 - protein, 8 aa, synthetic construct
  REGION 1..8: note = Synthetic
DIDMFAIM

SEQ ID NO: 2056 - protein, 9 aa, synthetic construct
  REGION 1..9: note = Synthetic
DMFAIMPHL

SEQ ID NO: 2057 - protein, 9 aa, synthetic construct
  REGION 1..9: note = Synthetic
DNVRNVENV

SEQ ID NO: 2058 - protein, 10 aa, synthetic construct
  REGION 1..10: note = Synthetic
DNVRNVENVI

SEQ ID NO: 2059 - protein, 8 aa, synthetic construct
  REGION 1..8: note = Synthetic
DTVDYSAM

SEQ ID NO: 2060 - protein, 9 aa, synthetic construct
  REGION 1..9: note = Synthetic
DTVDYSAMI

SEQ ID NO: 2061 - protein, 8 aa, synthetic construct
  REGION 1..8: note = Synthetic
DYLRQAGL

SEQ ID NO: 2062 - protein, 9 aa, synthetic construct
  REGION 1..9: note = Synthetic
DYYDNVRNV

SEQ ID NO: 2063 - protein, 8 aa, synthetic construct
  REGION 1..8: note = Synthetic
EFTTFVEI

SEQ ID NO: 2064 - protein, 9 aa, synthetic construct
  REGION 1..9: note = Synthetic
EFTTFVEIV

SEQ ID NO: 2065 - protein, 8 aa, synthetic construct
  REGION 1..8: note = Synthetic
EGYVFYEN

SEQ ID NO: 2066 - protein, 8 aa, synthetic construct
  REGION 1..8: note = Synthetic
ENVQYRHV

SEQ ID NO: 2067 - protein, 9 aa, synthetic construct
  REGION 1..9: note = Synthetic
EQLANSDGL

SEQ ID NO: 2068 - protein, 10 aa, synthetic construct
  REGION 1..10: note = Synthetic
FGVGYGHDTI

SEQ ID NO: 2069 - protein, 10 aa, synthetic construct
  REGION 1..10: note = Synthetic
FSPDVLETVP

SEQ ID NO: 2070 - protein, 9 aa, synthetic construct
  REGION 1..9: note = Synthetic
FSVDHVKNI

SEQ ID NO: 2071 - protein, 9 aa, synthetic construct
  REGION 1..9: note = Synthetic
GDDTYLFGV

SEQ ID NO: 2072 - protein, 9 aa, synthetic construct
  REGION 1..9: note = Synthetic
GDDVFLQDL

SEQ ID NO: 2073 - protein, 9 aa, synthetic construct
  REGION 1..9: note = Synthetic
GEDGNDIFL

SEQ ID NO: 2074 - protein, 10 aa, synthetic construct
  REGION 1..10: note = Synthetic
GERFNVRKQL

SEQ ID NO: 2075 - protein, 9 aa, synthetic construct
  REGION 1..9: note = Synthetic
GGAGNDTLV

SEQ ID NO: 2076 - protein, 8 aa, synthetic construct
  REGION 1..8: note = Synthetic
GGDDFEAV

SEQ ID NO: 2077 - protein, 9 aa, synthetic construct
  REGION 1..9: note = Synthetic
GKSEFTTFV

SEQ ID NO: 2078 - protein, 9 aa, synthetic construct
  REGION 1..9: note = Synthetic
GKSLFDDGL

SEQ ID NO: 2079 - protein, 9 aa, synthetic construct
  REGION 1..9: note = Synthetic
GNADNLKSV

SEQ ID NO: 2080 - protein, 9 aa, synthetic construct
  REGION 1..9: note = Synthetic
GQLVEVDTL

SEQ ID NO: 2081 - protein, 9 aa, synthetic construct
  REGION 1..9: note = Synthetic
GRSKFSPDV

SEQ ID NO: 2082 - protein, 8 aa, synthetic construct
  REGION 1..8: note = Synthetic
GSSAYDTV

SEQ ID NO: 2083 - protein, 9 aa, synthetic construct
  REGION 1..9: note = Synthetic
GTVEKWPAL

SEQ ID NO: 2084 - protein, 8 aa, synthetic construct
  REGION 1..8: note = Synthetic
GVDYYDNV

SEQ ID NO: 2085 - protein, 9 aa, synthetic construct
  REGION 1..9: note = Synthetic
GYEQFEFRV

SEQ ID NO: 2086 - protein, 9 aa, synthetic construct
  REGION 1..9: note = Synthetic
HAVGAQDVV

SEQ ID NO: 2087 - protein, 10 aa, synthetic construct
  REGION 1..10: note = Synthetic
IAAGRIGLGI

SEQ ID NO: 2088 - protein, 9 aa, synthetic construct
  REGION 1..9: note = Synthetic
IGDAQANTL

SEQ ID NO: 2089 - protein, 9 aa, synthetic construct
  REGION 1..9: note = Synthetic
IGLGILADL

SEQ ID NO: 2090 - protein, 9 aa, synthetic construct
  REGION 1..9: note = Synthetic
IGNAAGIPL

SEQ ID NO: 2091 - protein, 9 aa, synthetic construct
  REGION 1..9: note = Synthetic
IGTSMKDVL

SEQ ID NO: 2092 - protein, 9 aa, synthetic construct
  REGION 1..9: note = Synthetic
IGVITDFEL

SEQ ID NO: 2093 - protein, 9 aa, synthetic construct
  REGION 1..9: note = Synthetic
IPLTADIDM

SEQ ID NO: 2094 - protein, 8 aa, synthetic construct
  REGION 1..8: note = Synthetic
ISKSALEL

SEQ ID NO: 2095 - protein, 8 aa, synthetic construct
  REGION 1..8: note = Synthetic
ITGNADNL

SEQ ID NO: 2096 - protein, 8 aa, synthetic construct
  REGION 1..8: note = Synthetic
KIFVVSAT

SEQ ID NO: 2097 - protein, 10 aa, synthetic construct
  REGION 1..10: note = Synthetic
KQLNNANVYR

SEQ ID NO: 2098 - protein, 9 aa, synthetic construct
  REGION 1..9: note = Synthetic
KVIGNAAGI

SEQ ID NO: 2099 - protein, 8 aa, synthetic construct
  REGION 1..8: note = Synthetic
LAKVVSQL

SEQ ID NO: 2100 - protein, 9 aa, synthetic construct
  REGION 1..9: note = Synthetic
LANDYARKI

SEQ ID NO: 2101 - protein, 9 aa, synthetic construct
  REGION 1..9: note = Synthetic
LDYLRQAGL

SEQ ID NO: 2102 - protein, 8 aa, synthetic construct
  REGION 1..8: note = Synthetic
LGKGFASL

SEQ ID NO: 2103 - protein, 9 aa, synthetic construct
  REGION 1..9: note = Synthetic
LGKGFASLM

SEQ ID NO: 2104 - protein, 8 aa, synthetic construct
  REGION 1..8: note = Synthetic
LGVDYYDN

SEQ ID NO: 2105 - protein, 9 aa, synthetic construct
  REGION 1..9: note = Synthetic
LGVDYYDNV

SEQ ID NO: 2106 - protein, 10 aa, synthetic construct
  REGION 1..10: note = Synthetic
LKHSIKLDVI

SEQ ID NO: 2107 - protein, 8 aa, synthetic construct
  REGION 1..8: note = Synthetic
LQAGYIPV

SEQ ID NO: 2108 - protein, 9 aa, synthetic construct
  REGION 1..9: note = Synthetic
LQLTGGTVE

SEQ ID NO: 2109 - protein, 8 aa, synthetic construct
  REGION 1..8: note = Synthetic
LSAAVFGL

SEQ ID NO: 2110 - protein, 10 aa, synthetic construct
  REGION 1..10: note = Synthetic
LSLGKGFASL

SEQ ID NO: 2111 - protein, 9 aa, synthetic construct
  REGION 1..9: note = Synthetic
LSPMEIYGL

SEQ ID NO: 2112 - protein, 10 aa, synthetic construct
  REGION 1..10: note = Synthetic
NAHDNFLAGG

SEQ ID NO: 2113 - protein, 9 aa, synthetic construct
  REGION 1..9: note = Synthetic
NANVYREGV

SEQ ID NO: 2114 - protein, 8 aa, synthetic construct
  REGION 1..8: note = Synthetic
NDTLYGGL

SEQ ID NO: 2115 - protein, 9 aa, synthetic construct
  REGION 1..9: note = Synthetic
NGLAGNDVL

SEQ ID NO: 2116 - protein, 10 aa, synthetic construct
  REGION 1..10: note = Synthetic
NNANVYREGV

SEQ ID NO: 2117 - protein, 8 aa, synthetic construct
  REGION 1..8: note = Synthetic
NTVSYAAL

SEQ ID NO: 2118 - protein, 10 aa, synthetic construct
  REGION 1..10: note = Synthetic
NVLRNIENAV

SEQ ID NO: 2119 - protein, 9 aa, synthetic construct
  REGION 1..9: note = Synthetic
PALTFITPL

SEQ ID NO: 2120 - protein, 10 aa, synthetic construct
  REGION 1..10: note = Synthetic
PETSNVLRNI

SEQ ID NO: 2121 - protein, 8 aa, synthetic construct
  REGION 1..8: note = Synthetic
PMEIYGLV

SEQ ID NO: 2122 - protein, 9 aa, synthetic construct
  REGION 1..9: note = Synthetic
PQAYFEKNL

SEQ ID NO: 2123 - protein, 9 aa, synthetic construct
  REGION 1..9: note = Synthetic
PVNPNLSKL

SEQ ID NO: 2124 - protein, 9 aa, synthetic construct
  REGION 1..9: note = Synthetic
QAGWNASSV

SEQ ID NO: 2125 - protein, 10 aa, synthetic construct
  REGION 1..10: note = Synthetic
QAGWNASSVI

SEQ ID NO: 2126 - protein, 9 aa, synthetic construct
  REGION 1..9: note = Synthetic
QDAANAGNL

SEQ ID NO: 2127 - protein, 10 aa, synthetic construct
  REGION 1..10: note = Synthetic
QDAANAGNLL

SEQ ID NO: 2128 - protein, 8 aa, synthetic construct
  REGION 1..8: note = Synthetic
QDSGYDSL

SEQ ID NO: 2129 - protein, 9 aa, synthetic construct
  REGION 1..9: note = Synthetic
QQSHYADQL

SEQ ID NO: 2130 - protein, 9 aa, synthetic construct
  REGION 1..9: note = Synthetic
RALQGAQAV

SEQ ID NO: 2131 - protein, 9 aa, synthetic construct
  REGION 1..9: note = Synthetic
RGGLGLDTL

SEQ ID NO: 2132 - protein, 9 aa, synthetic construct
  REGION 1..9: note = Synthetic
RKQLNNANV

SEQ ID NO: 2133 - protein, 9 aa, synthetic construct
  REGION 1..9: note = Synthetic
RQDSGYDSL

SEQ ID NO: 2134 - protein, 9 aa, synthetic construct
  REGION 1..9: note = Synthetic
RQFRYDGDM

SEQ ID NO: 2135 - protein, 9 aa, synthetic construct
  REGION 1..9: note = Synthetic
RSKFSPDVL

SEQ ID NO: 2136 - protein, 9 aa, synthetic construct
  REGION 1..9: note = Synthetic
SAGAAAGAL

SEQ ID NO: 2137 - protein, 9 aa, synthetic construct
  REGION 1..9: note = Synthetic
SAHWGQRAL

SEQ ID NO: 2138 - protein, 9 aa, synthetic construct
  REGION 1..9: note = Synthetic
SAMIHPGRI

SEQ ID NO: 2139 - protein, 10 aa, synthetic construct
  REGION 1..10: note = Synthetic
SAMIHPGRIV

SEQ ID NO: 2140 - protein, 9 aa, synthetic construct
  REGION 1..9: note = Synthetic
SAYDTVSGI

SEQ ID NO: 2141 - protein, 8 aa, synthetic construct
  REGION 1..8: note = Synthetic
SAYGYEGD

SEQ ID NO: 2142 - protein, 9 aa, synthetic construct
  REGION 1..9: note = Synthetic
SGGAGDDVL

SEQ ID NO: 2143 - protein, 8 aa, synthetic construct
  REGION 1..8: note = Synthetic
SGLQVAGA

SEQ ID NO: 2144 - protein, 9 aa, synthetic construct
  REGION 1..9: note = Synthetic
SGYDSLDGV

SEQ ID NO: 2145 - protein, 10 aa, synthetic construct
  REGION 1..10: note = Synthetic
SLLTGALNGI

SEQ ID NO: 2146 - protein, 8 aa, synthetic construct
  REGION 1..8: note = Synthetic
SPMEIYGL

SEQ ID NO: 2147 - protein, 9 aa, synthetic construct
  REGION 1..9: note = Synthetic
SQMLTRGQL

SEQ ID NO: 2148 - protein, 10 aa, synthetic construct
  REGION 1..10: note = Synthetic
SSAYDTVSGI

SEQ ID NO: 2149 - protein, 9 aa, synthetic construct
  REGION 1..9: note = Synthetic
SSLAHGHTA

SEQ ID NO: 2150 - protein, 9 aa, synthetic construct
  REGION 1..9: note = Synthetic
SSVTSGDSV

SEQ ID NO: 2151 - protein, 10 aa, synthetic construct
  REGION 1..10: note = Synthetic
SVIGVQTTEI

SEQ ID NO: 2152 - protein, 9 aa, synthetic construct
  REGION 1..9: note = Synthetic
TNTVSYAAL

SEQ ID NO: 2153 - protein, 8 aa, synthetic construct
  REGION 1..8: note = Synthetic
TSLIAEGV

SEQ ID NO: 2154 - protein, 8 aa, synthetic construct
  REGION 1..8: note = Synthetic
TSLLTGAL

SEQ ID NO: 2155 - protein, 8 aa, synthetic construct
  REGION 1..8: note = Synthetic
TVPASPGL

SEQ ID NO: 2156 - protein, 9 aa, synthetic construct
  REGION 1..9: note = Synthetic
VAKEKNATL

SEQ ID NO: 2157 - protein, 10 aa, synthetic construct
  REGION 1..10: note = Synthetic
VAPHEYGFGI

SEQ ID NO: 2158 - protein, 8 aa, synthetic construct
  REGION 1..8: note = Synthetic
VAVVTSLL

SEQ ID NO: 2159 - protein, 9 aa, synthetic construct
  REGION 1..9: note = Synthetic
VFYENRAYG

SEQ ID NO: 2160 - protein, 10 aa, synthetic construct
  REGION 1..10: note = Synthetic
VFYENRAYGV

SEQ ID NO: 2161 - protein, 9 aa, synthetic construct
  REGION 1..9: note = Synthetic
VITDFELEV

SEQ ID NO: 2162 - protein, 8 aa, synthetic construct
  REGION 1..8: note = Synthetic
VNPHSTSL

SEQ ID NO: 2163 - protein, 9 aa, synthetic construct
  REGION 1..9: note = Synthetic
VNPHSTSLI

SEQ ID NO: 2164 - protein, 8 aa, synthetic construct
  REGION 1..8: note = Synthetic
VNPNLSKL

SEQ ID NO: 2165 - protein, 9 aa, synthetic construct
  REGION 1..9: note = Synthetic
VNPNLSKLF

SEQ ID NO: 2166 - protein, 9 aa, synthetic construct
  REGION 1..9: note = Synthetic
VQQPIIEKL

SEQ ID NO: 2167 - protein, 8 aa, synthetic construct
  REGION 1..8: note = Synthetic
VQYRHVEL

SEQ ID NO: 2168 - protein, 9 aa, synthetic construct
  REGION 1..9: note = Synthetic
VSIAAAASV

SEQ ID NO: 2169 - protein, 10 aa, synthetic construct
  REGION 1..10: note = Synthetic
VSIAAAASVV

SEQ ID NO: 2170 - protein, 9 aa, synthetic construct
  REGION 1..9: note = Synthetic
VTSLLTGAL

SEQ ID NO: 2171 - protein, 9 aa, synthetic construct
  REGION 1..9: note = Synthetic
VVLANASRI

SEQ ID NO: 2172 - protein, 9 aa, synthetic construct
  REGION 1..9: note = Synthetic
WPALNLFSV

SEQ ID NO: 2173 - protein, 8 aa, synthetic construct
  REGION 1..8: note = Synthetic
WVRKASAL

SEQ ID NO: 2174 - protein, 10 aa, synthetic construct
  REGION 1..10: note = Synthetic
YAVQYRRKGG

SEQ ID NO: 2175 - protein, 9 aa, synthetic construct
  REGION 1..9: note = Synthetic
YGGLGDDTL

SEQ ID NO: 2176 - protein, 10 aa, synthetic construct
  REGION 1..10: note = Synthetic
YGLVQQSHYA

SEQ ID NO: 2177 - protein, 9 aa, synthetic construct
  REGION 1..9: note = Synthetic
YGYEGDALL

SEQ ID NO: 2178 - protein, 8 aa, synthetic construct
  REGION 1..8: note = Synthetic
YIPVNPNL

SEQ ID NO: 2179 - protein, 10 aa, synthetic construct
  REGION 1..10: note = Synthetic
YSAMIHPGRI

SEQ ID NO: 2180 - protein, 10 aa, synthetic construct
  REGION 1..10: note = Synthetic
YSQTGAHAGI

SEQ ID NO: 2181 - protein, 20 aa, synthetic construct
  REGION 1..20: note = Synthetic
AYNFVESIINLFQVVHNSYN

SEQ ID NO: 2182 - protein, 6 aa, synthetic construct
  REGION 1..6: note = Synthetic
SGTTIK

SEQ ID NO: 2183 - protein, 15 aa, synthetic construct
  REGION 1..15: note = Synthetic
RGHTLESAEGRKIFG

SEQ ID NO: 2184 - protein, 22 aa, synthetic construct
  REGION 1..22: note = Synthetic
AGAMTVRDVAAAADLALQAGDA

SEQ ID NO: 2185 - protein, 23 aa, synthetic construct
  REGION 1..23: note = Synthetic
AGAMTVRDVAAAADLALQAGDAL

SEQ ID NO: 2186 - protein, 30 aa, synthetic construct
  REGION 1..30: note = Synthetic
ALAAVLVNPHIFTRIGAAQTSLADGAAGPA

SEQ ID NO: 2187 - protein, 12 aa, synthetic construct
  REGION 1..12: note = Synthetic
ALSIDSMTALGA

SEQ ID NO: 2188 - protein, 15 aa, synthetic construct
  REGION 1..15: note = Synthetic
DLSAARGADISGEGR

SEQ ID NO: 2189 - protein, 12 aa, synthetic construct
  REGION 1..12: note = Synthetic
DQNRYEYIWGLY

SEQ ID NO: 2190 - protein, 12 aa, synthetic construct
  REGION 1..12: note = Synthetic
DYTVSADAIALA

SEQ ID NO: 2191 - protein, 16 aa, synthetic construct
  REGION 1..16: note = Synthetic
GPIVVEAGELVSHAGG

SEQ ID NO: 2192 - protein, 23 aa, synthetic construct
  REGION 1..23: note = Synthetic
GRPEGLKIGAHSATSVSGSFDAL

SEQ ID NO: 2193 - protein, 19 aa, synthetic construct
  REGION 1..19: note = Synthetic
ITVTSRGGFDNEGKMESNK

SEQ ID NO: 2194 - protein, 14 aa, synthetic construct
  REGION 1..14: note = Synthetic
LDQNRYEYIWGLYP

SEQ ID NO: 2195 - protein, 11 aa, synthetic construct
  REGION 1..11: note = Synthetic
LSAARGADISG

SEQ ID NO: 2196 - protein, 10 aa, synthetic construct
  REGION 1..10: note = Synthetic
NKIRLMGPLQ

SEQ ID NO: 2197 - protein, 12 aa, synthetic construct
  REGION 1..12: note = Synthetic
NKLGRIRAGEDM

SEQ ID NO: 2198 - protein, 20 aa, synthetic construct
  REGION 1..20: note = Synthetic
NKLGRIRAGEDMHLDAPRIE

SEQ ID NO: 2199 - protein, 12 aa, synthetic construct
  REGION 1..12: note = Synthetic
PHLRNTGQVVAG

SEQ ID NO: 2200 - protein, 17 aa, synthetic construct
  REGION 1..17: note = Synthetic
QVDLHDLSAARGADISG

SEQ ID NO: 2201 - protein, 12 aa, synthetic construct
  REGION 1..12: note = Synthetic
RDVAAAADLALQ

SEQ ID NO: 2202 - protein, 12 aa, synthetic construct
  REGION 1..12: note = Synthetic
SAARGADISGEG

SEQ ID NO: 2203 - protein, 15 aa, synthetic construct
  REGION 1..15: note = Synthetic
TKGEMQIAGKGGGSP

SEQ ID NO: 2204 - protein, 12 aa, synthetic construct
  REGION 1..12: note = Synthetic
TVSADAIALAAQ

SEQ ID NO: 2205 - protein, 9 aa, synthetic construct
  REGION 1..9: note = Synthetic
VVAGHDIHI

SEQ ID NO: 2206 - protein, 24 aa, synthetic construct
  REGION 1..24: note = Synthetic
PSGPNHTKVVQLPKISKNALKANG

SEQ ID NO: 2207 - protein, 41 aa, synthetic construct
  REGION 1..41: note = Synthetic
LVGATPERPRLRLVDADDPLLRTAPGPGEVWVTPVIGSQAR

SEQ ID NO: 2208 - protein, 27 aa, synthetic construct
  REGION 1..27: note = Synthetic
QQSRWGLGSPNCHGPDWASPVCQRHSP

SEQ ID NO: 2209 - protein, 17 aa, synthetic construct
  REGION 1..17: note = Synthetic
AGEAMVLVYYESIAYSF

SEQ ID NO: 2210 - protein, 24 aa, synthetic construct
  REGION 1..24: note = Synthetic
GGVGLASTLWYAESNALSKRLGEL

SEQ ID NO: 2211 - protein, 18 aa, synthetic construct
  REGION 1..18: note = Synthetic
GTLVRIAPVIGACMARQA

SEQ ID NO: 2212 - protein, 18 aa, synthetic construct
  REGION 1..18: note = Synthetic
IRRVTRVYHNGITGETTT

SEQ ID NO: 2213 - protein, 18 aa, synthetic construct
  REGION 1..18: note = Synthetic
IVKTGERQHGIHIQGSDP

SEQ ID NO: 2214 - protein, 24 aa, synthetic construct
  REGION 1..24: note = Synthetic
IVKTGERQHGIHIQGSDPGGVRTA

SEQ ID NO: 2215 - protein, 24 aa, synthetic construct
  REGION 1..24: note = Synthetic
LRDTNVTAVPASGAPAAVSVLGAS

SEQ ID NO: 2216 - protein, 24 aa, synthetic construct
  REGION 1..24: note = Synthetic
PEAPAPQPPAGRELSAAANAAVNT

SEQ ID NO: 2217 - protein, 9 aa, synthetic construct
  REGION 1..9: note = Synthetic
AAADFAHAE

SEQ ID NO: 2218 - protein, 9 aa, synthetic construct
  REGION 1..9: note = Synthetic
AAAEVAGAL

SEQ ID NO: 2219 - protein, 9 aa, synthetic construct
  REGION 1..9: note = Synthetic
AAESTFESY

SEQ ID NO: 2220 - protein, 9 aa, synthetic construct
  REGION 1..9: note = Synthetic
AAGFDPEVQ

SEQ ID NO: 2221 - protein, 9 aa, synthetic construct
  REGION 1..9: note = Synthetic
AALGRGHSL

SEQ ID NO: 2222 - protein, 9 aa, synthetic construct
  REGION 1..9: note = Synthetic
AAMQGAVVH

SEQ ID NO: 2223 - protein, 9 aa, synthetic construct
  REGION 1..9: note = Synthetic
AAPAAHADW

SEQ ID NO: 2224 - protein, 9 aa, synthetic construct
  REGION 1..9: note = Synthetic
AAQATVVQR

SEQ ID NO: 2225 - protein, 9 aa, synthetic construct
  REGION 1..9: note = Synthetic
AARVAGDNY

SEQ ID NO: 2226 - protein, 9 aa, synthetic construct
  REGION 1..9: note = Synthetic
AAVALLNKL

SEQ ID NO: 2227 - protein, 9 aa, synthetic construct
  REGION 1..9: note = Synthetic
ADDPPATVY

SEQ ID NO: 2228 - protein, 9 aa, synthetic construct
  REGION 1..9: note = Synthetic
AEAGRFKVL

SEQ ID NO: 2229 - protein, 9 aa, synthetic construct
  REGION 1..9: note = Synthetic
AEATQLVTA

SEQ ID NO: 2230 - protein, 9 aa, synthetic construct
  REGION 1..9: note = Synthetic
AEGGATLGA

SEQ ID NO: 2231 - protein, 9 aa, synthetic construct
  REGION 1..9: note = Synthetic
AEHGEVSIQ

SEQ ID NO: 2232 - protein, 9 aa, synthetic construct
  REGION 1..9: note = Synthetic
AEIAFYPKE

SEQ ID NO: 2233 - protein, 9 aa, synthetic construct
  REGION 1..9: note = Synthetic
AEKVTTPAV

SEQ ID NO: 2234 - protein, 9 aa, synthetic construct
  REGION 1..9: note = Synthetic
AELQTYLRQ

SEQ ID NO: 2235 - protein, 9 aa, synthetic construct
  REGION 1..9: note = Synthetic
AEQSLIEVG

SEQ ID NO: 2236 - protein, 9 aa, synthetic construct
  REGION 1..9: note = Synthetic
AESNALSKR

SEQ ID NO: 2237 - protein, 9 aa, synthetic construct
  REGION 1..9: note = Synthetic
AESSEAMAA

SEQ ID NO: 2238 - protein, 9 aa, synthetic construct
  REGION 1..9: note = Synthetic
AEVKVGYRA

SEQ ID NO: 2239 - protein, 9 aa, synthetic construct
  REGION 1..9: note = Synthetic
AEVTDTSPS

SEQ ID NO: 2240 - protein, 9 aa, synthetic construct
  REGION 1..9: note = Synthetic
AGKSLKKKN

SEQ ID NO: 2241 - protein, 9 aa, synthetic construct
  REGION 1..9: note = Synthetic
AGLAGPSAV

SEQ ID NO: 2242 - protein, 9 aa, synthetic construct
  REGION 1..9: note = Synthetic
AIRVGRGAR

SEQ ID NO: 2243 - protein, 9 aa, synthetic construct
  REGION 1..9: note = Synthetic
ALAAIASAA

SEQ ID NO: 2244 - protein, 9 aa, synthetic construct
  REGION 1..9: note = Synthetic
ALADVPYVL

SEQ ID NO: 2245 - protein, 9 aa, synthetic construct
  REGION 1..9: note = Synthetic
ALANDGTIV

SEQ ID NO: 2246 - protein, 9 aa, synthetic construct
  REGION 1..9: note = Synthetic
ALGRGHSLY

SEQ ID NO: 2247 - protein, 9 aa, synthetic construct
  REGION 1..9: note = Synthetic
ALILAASPV

SEQ ID NO: 2248 - protein, 9 aa, synthetic construct
  REGION 1..9: note = Synthetic
ALMLACTGL

SEQ ID NO: 2249 - protein, 9 aa, synthetic construct
  REGION 1..9: note = Synthetic
AMQGAVVHL

SEQ ID NO: 2250 - protein, 9 aa, synthetic construct
  REGION 1..9: note = Synthetic
AMTHLSPAL

SEQ ID NO: 2251 - protein, 9 aa, synthetic construct
  REGION 1..9: note = Synthetic
AMYGKHITL

SEQ ID NO: 2252 - protein, 9 aa, synthetic construct
  REGION 1..9: note = Synthetic
ANEANALLW

SEQ ID NO: 2253 - protein, 9 aa, synthetic construct
  REGION 1..9: note = Synthetic
APLSITLQA

SEQ ID NO: 2254 - protein, 9 aa, synthetic construct
  REGION 1..9: note = Synthetic
APNALAWAL

SEQ ID NO: 2255 - protein, 9 aa, synthetic construct
  REGION 1..9: note = Synthetic
APPAPKPAP

SEQ ID NO: 2256 - protein, 9 aa, synthetic construct
  REGION 1..9: note = Synthetic
APPGAGFIY

SEQ ID NO: 2257 - protein, 9 aa, synthetic construct
  REGION 1..9: note = Synthetic
APQAAPLSI

SEQ ID NO: 2258 - protein, 9 aa, synthetic construct
  REGION 1..9: note = Synthetic
APRIENTAK

SEQ ID NO: 2259 - protein, 9 aa, synthetic construct
  REGION 1..9: note = Synthetic
AQGKALLYR

SEQ ID NO: 2260 - protein, 9 aa, synthetic construct
  REGION 1..9: note = Synthetic
AQITSYVGF

SEQ ID NO: 2261 - protein, 9 aa, synthetic construct
  REGION 1..9: note = Synthetic
AQLEVRGQR

SEQ ID NO: 2262 - protein, 9 aa, synthetic construct
  REGION 1..9: note = Synthetic
AQQLKQADR

SEQ ID NO: 2263 - protein, 9 aa, synthetic construct
  REGION 1..9: note = Synthetic
AQVTVAGRY

SEQ ID NO: 2264 - protein, 9 aa, synthetic construct
  REGION 1..9: note = Synthetic
ARRSRVRAL

SEQ ID NO: 2265 - protein, 9 aa, synthetic construct
  REGION 1..9: note = Synthetic
ASPRRARRA

SEQ ID NO: 2266 - protein, 9 aa, synthetic construct
  REGION 1..9: note = Synthetic
ASSPDAHVP

SEQ ID NO: 2267 - protein, 9 aa, synthetic construct
  REGION 1..9: note = Synthetic
ASVSNPGTF

SEQ ID NO: 2268 - protein, 9 aa, synthetic construct
  REGION 1..9: note = Synthetic
ATWNFQSTY

SEQ ID NO: 2269 - protein, 9 aa, synthetic construct
  REGION 1..9: note = Synthetic
ATYIADSGF

SEQ ID NO: 2270 - protein, 9 aa, synthetic construct
  REGION 1..9: note = Synthetic
AVAAPAVGA

SEQ ID NO: 2271 - protein, 9 aa, synthetic construct
  REGION 1..9: note = Synthetic
AVFMQQRPL

SEQ ID NO: 2272 - protein, 9 aa, synthetic construct
  REGION 1..9: note = Synthetic
AVLVNPHIF

SEQ ID NO: 2273 - protein, 9 aa, synthetic construct
  REGION 1..9: note = Synthetic
CFGKDLKRP

SEQ ID NO: 2274 - protein, 9 aa, synthetic construct
  REGION 1..9: note = Synthetic
CPSSLGNGV

SEQ ID NO: 2275 - protein, 9 aa, synthetic construct
  REGION 1..9: note = Synthetic
DAGHEHDTW

SEQ ID NO: 2276 - protein, 9 aa, synthetic construct
  REGION 1..9: note = Synthetic
DAKHDLTVT

SEQ ID NO: 2277 - protein, 9 aa, synthetic construct
  REGION 1..9: note = Synthetic
DASGQHRLW

SEQ ID NO: 2278 - protein, 9 aa, synthetic construct
  REGION 1..9: note = Synthetic
DATFETYAL

SEQ ID NO: 2279 - protein, 9 aa, synthetic construct
  REGION 1..9: note = Synthetic
DATFQTYAL

SEQ ID NO: 2280 - protein, 9 aa, synthetic construct
  REGION 1..9: note = Synthetic
DATLVGAKF

SEQ ID NO: 2281 - protein, 9 aa, synthetic construct
  REGION 1..9: note = Synthetic
DDEVDVSGR

SEQ ID NO: 2282 - protein, 9 aa, synthetic construct
  REGION 1..9: note = Synthetic
DENGKPQTY

SEQ ID NO: 2283 - protein, 9 aa, synthetic construct
  REGION 1..9: note = Synthetic
DGPPSRPTT

SEQ ID NO: 2284 - protein, 9 aa, synthetic construct
  REGION 1..9: note = Synthetic
DHLTGRSCQ

SEQ ID NO: 2285 - protein, 9 aa, synthetic construct
  REGION 1..9: note = Synthetic
DNEGKMESN

SEQ ID NO: 2286 - protein, 9 aa, synthetic construct
  REGION 1..9: note = Synthetic
DPPATVYRY

SEQ ID NO: 2287 - protein, 9 aa, synthetic construct
  REGION 1..9: note = Synthetic
EATEGDATL

SEQ ID NO: 2288 - protein, 9 aa, synthetic construct
  REGION 1..9: note = Synthetic
EATQQAAGF

SEQ ID NO: 2289 - protein, 9 aa, synthetic construct
  REGION 1..9: note = Synthetic
ECSGKQDCP

SEQ ID NO: 2290 - protein, 9 aa, synthetic construct
  REGION 1..9: note = Synthetic
EGGKLRGKD

SEQ ID NO: 2291 - protein, 9 aa, synthetic construct
  REGION 1..9: note = Synthetic
EGKMESNKD

SEQ ID NO: 2292 - protein, 9 aa, synthetic construct
  REGION 1..9: note = Synthetic
EHRMQEAVE

SEQ ID NO: 2293 - protein, 9 aa, synthetic construct
  REGION 1..9: note = Synthetic
EKRLDIDDA

SEQ ID NO: 2294 - protein, 9 aa, synthetic construct
  REGION 1..9: note = Synthetic
EPASANTLL

SEQ ID NO: 2295 - protein, 9 aa, synthetic construct
  REGION 1..9: note = Synthetic
EPQAELAVF

SEQ ID NO: 2296 - protein, 9 aa, synthetic construct
  REGION 1..9: note = Synthetic
EPVKLTLTG

SEQ ID NO: 2297 - protein, 9 aa, synthetic construct
  REGION 1..9: note = Synthetic
ESAEGRKIF

SEQ ID NO: 2298 - protein, 9 aa, synthetic construct
  REGION 1..9: note = Synthetic
ESYSESHNF

SEQ ID NO: 2299 - protein, 9 aa, synthetic construct
  REGION 1..9: note = Synthetic
ETFCITTIY

SEQ ID NO: 2300 - protein, 9 aa, synthetic construct
  REGION 1..9: note = Synthetic
EVAGALELS

SEQ ID NO: 2301 - protein, 9 aa, synthetic construct
  REGION 1..9: note = Synthetic
EVAKVEVVP

SEQ ID NO: 2302 - protein, 9 aa, synthetic construct
  REGION 1..9: note = Synthetic
EVDGIIQEF

SEQ ID NO: 2303 - protein, 9 aa, synthetic construct
  REGION 1..9: note = Synthetic
EVRADNNFY

SEQ ID NO: 2304 - protein, 9 aa, synthetic construct
  REGION 1..9: note = Synthetic
FAILSSTTE

SEQ ID NO: 2305 - protein, 9 aa, synthetic construct
  REGION 1..9: note = Synthetic
FAISAYALK

SEQ ID NO: 2306 - protein, 9 aa, synthetic construct
  REGION 1..9: note = Synthetic
FALYDGTYL

SEQ ID NO: 2307 - protein, 9 aa, synthetic construct
  REGION 1..9: note = Synthetic
FDTMLGFAI

SEQ ID NO: 2308 - protein, 9 aa, synthetic construct
  REGION 1..9: note = Synthetic
FEGKPALEL

SEQ ID NO: 2309 - protein, 9 aa, synthetic construct
  REGION 1..9: note = Synthetic
FELGADHAV

SEQ ID NO: 2310 - protein, 9 aa, synthetic construct
  REGION 1..9: note = Synthetic
FEPGITTNY

SEQ ID NO: 2311 - protein, 9 aa, synthetic construct
  REGION 1..9: note = Synthetic
FETYALTGI

SEQ ID NO: 2312 - protein, 9 aa, synthetic construct
  REGION 1..9: note = Synthetic
FIYRETFCI

SEQ ID NO: 2313 - protein, 9 aa, synthetic construct
  REGION 1..9: note = Synthetic
FPTRTTAPG

SEQ ID NO: 2314 - protein, 9 aa, synthetic construct
  REGION 1..9: note = Synthetic
FQTYALTGI

SEQ ID NO: 2315 - protein, 9 aa, synthetic construct
  REGION 1..9: note = Synthetic
FTHADGWFL

SEQ ID NO: 2316 - protein, 9 aa, synthetic construct
  REGION 1..9: note = Synthetic
FVRDGQSVI

SEQ ID NO: 2317 - protein, 9 aa, synthetic construct
  REGION 1..9: note = Synthetic
FVRSGQPVI

SEQ ID NO: 2318 - protein, 9 aa, synthetic construct
  REGION 1..9: note = Synthetic
FVWYVDTVI

SEQ ID NO: 2319 - protein, 9 aa, synthetic construct
  REGION 1..9: note = Synthetic
GAASSRQAL

SEQ ID NO: 2320 - protein, 9 aa, synthetic construct
  REGION 1..9: note = Synthetic
GAASSYFEY

SEQ ID NO: 2321 - protein, 9 aa, synthetic construct
  REGION 1..9: note = Synthetic
GAFDLKTTF

SEQ ID NO: 2322 - protein, 9 aa, synthetic construct
  REGION 1..9: note = Synthetic
GAPAAVSVL

SEQ ID NO: 2323 - protein, 9 aa, synthetic construct
  REGION 1..9: note = Synthetic
GATRAVDSL

SEQ ID NO: 2324 - protein, 9 aa, synthetic construct
  REGION 1..9: note = Synthetic
GAVPGGAVP

SEQ ID NO: 2325 - protein, 9 aa, synthetic construct
  REGION 1..9: note = Synthetic
GEAMVLVYY

SEQ ID NO: 2326 - protein, 9 aa, synthetic construct
  REGION 1..9: note = Synthetic
GEIALGDAT

SEQ ID NO: 2327 - protein, 9 aa, synthetic construct
  REGION 1..9: note = Synthetic
GELMAAQVA

SEQ ID NO: 2328 - protein, 9 aa, synthetic construct
  REGION 1..9: note = Synthetic
GGVPGGAVP

SEQ ID NO: 2329 - protein, 9 aa, synthetic construct
  REGION 1..9: note = Synthetic
GHEHDTWFD

SEQ ID NO: 2330 - protein, 9 aa, synthetic construct
  REGION 1..9: note = Synthetic
GIGALKAGA

SEQ ID NO: 2331 - protein, 9 aa, synthetic construct
  REGION 1..9: note = Synthetic
GIVIPPKAL

SEQ ID NO: 2332 - protein, 9 aa, synthetic construct
  REGION 1..9: note = Synthetic
GKDLKRPGS

SEQ ID NO: 2333 - protein, 9 aa, synthetic construct
  REGION 1..9: note = Synthetic
GKLPKPVTV

SEQ ID NO: 2334 - protein, 9 aa, synthetic construct
  REGION 1..9: note = Synthetic
GKSLKKKNQ

SEQ ID NO: 2335 - protein, 9 aa, synthetic construct
  REGION 1..9: note = Synthetic
GLDVQQGTV

SEQ ID NO: 2336 - protein, 9 aa, synthetic construct
  REGION 1..9: note = Synthetic
GLTDGVSRI

SEQ ID NO: 2337 - protein, 9 aa, synthetic construct
  REGION 1..9: note = Synthetic
GLYPTYTEW

SEQ ID NO: 2338 - protein, 9 aa, synthetic construct
  REGION 1..9: note = Synthetic
GLYQTYTEW

SEQ ID NO: 2339 - protein, 9 aa, synthetic construct
  REGION 1..9: note = Synthetic
GPPSRPTTP

SEQ ID NO: 2340 - protein, 9 aa, synthetic construct
  REGION 1..9: note = Synthetic
GPSAVAAPA

SEQ ID NO: 2341 - protein, 9 aa, synthetic construct
  REGION 1..9: note = Synthetic
GVAPTAQQL

SEQ ID NO: 2342 - protein, 9 aa, synthetic construct
  REGION 1..9: note = Synthetic
GVGLASTLW

SEQ ID NO: 2343 - protein, 9 aa, synthetic construct
  REGION 1..9: note = Synthetic
GYEAGFSLG

SEQ ID NO: 2344 - protein, 9 aa, synthetic construct
  REGION 1..9: note = Synthetic
HADDGTIVI

SEQ ID NO: 2345 - protein, 9 aa, synthetic construct
  REGION 1..9: note = Synthetic
HADWNNQSI

SEQ ID NO: 2346 - protein, 9 aa, synthetic construct
  REGION 1..9: note = Synthetic
HAEHEKDVR

SEQ ID NO: 2347 - protein, 9 aa, synthetic construct
  REGION 1..9: note = Synthetic
HANHYGTRI

SEQ ID NO: 2348 - protein, 9 aa, synthetic construct
  REGION 1..9: note = Synthetic
HAQGKALLY

SEQ ID NO: 2349 - protein, 9 aa, synthetic construct
  REGION 1..9: note = Synthetic
HFIGYIYEV

SEQ ID NO: 2350 - protein, 9 aa, synthetic construct
  REGION 1..9: note = Synthetic
HLSPALADV

SEQ ID NO: 2351 - protein, 9 aa, synthetic construct
  REGION 1..9: note = Synthetic
HSLYASYEY

SEQ ID NO: 2352 - protein, 9 aa, synthetic construct
  REGION 1..9: note = Synthetic
HVRGMLVPV

SEQ ID NO: 2353 - protein, 9 aa, synthetic construct
  REGION 1..9: note = Synthetic
HVSKEEQYY

SEQ ID NO: 2354 - protein, 9 aa, synthetic construct
  REGION 1..9: note = Synthetic
HVTRGWSIF

SEQ ID NO: 2355 - protein, 9 aa, synthetic construct
  REGION 1..9: note = Synthetic
IADSGFYLD

SEQ ID NO: 2356 - protein, 9 aa, synthetic construct
  REGION 1..9: note = Synthetic
IAHRTELRG

SEQ ID NO: 2357 - protein, 9 aa, synthetic construct
  REGION 1..9: note = Synthetic
IENTAKLSG

SEQ ID NO: 2358 - protein, 9 aa, synthetic construct
  REGION 1..9: note = Synthetic
IESKISQSV

SEQ ID NO: 2359 - protein, 9 aa, synthetic construct
  REGION 1..9: note = Synthetic
IETGGARRF

SEQ ID NO: 2360 - protein, 9 aa, synthetic construct
  REGION 1..9: note = Synthetic
IIKDAPPGA

SEQ ID NO: 2361 - protein, 9 aa, synthetic construct
  REGION 1..9: note = Synthetic
IIQEFAADL

SEQ ID NO: 2362 - protein, 9 aa, synthetic construct
  REGION 1..9: note = Synthetic
ILAGALATY

SEQ ID NO: 2363 - protein, 9 aa, synthetic construct
  REGION 1..9: note = Synthetic
ILLENPAAE

SEQ ID NO: 2364 - protein, 9 aa, synthetic construct
  REGION 1..9: note = Synthetic
ILPILVLAL

SEQ ID NO: 2365 - protein, 9 aa, synthetic construct
  REGION 1..9: note = Synthetic
IPFQRALRL

SEQ ID NO: 2366 - protein, 9 aa, synthetic construct
  REGION 1..9: note = Synthetic
ISVRVHVSK

SEQ ID NO: 2367 - protein, 9 aa, synthetic construct
  REGION 1..9: note = Synthetic
ITNETGKTY

SEQ ID NO: 2368 - protein, 9 aa, synthetic construct
  REGION 1..9: note = Synthetic
ITNKRAALI

SEQ ID NO: 2369 - protein, 9 aa, synthetic construct
  REGION 1..9: note = Synthetic
ITSYVGFSV

SEQ ID NO: 2370 - protein, 9 aa, synthetic construct
  REGION 1..9: note = Synthetic
ITVTSRGGF

SEQ ID NO: 2371 - protein, 9 aa, synthetic construct
  REGION 1..9: note = Synthetic
IVIPPKALF

SEQ ID NO: 2372 - protein, 9 aa, synthetic construct
  REGION 1..9: note = Synthetic
IVVEAGELV

SEQ ID NO: 2373 - protein, 9 aa, synthetic construct
  REGION 1..9: note = Synthetic
KAAKSVNLM

SEQ ID NO: 2374 - protein, 9 aa, synthetic construct
  REGION 1..9: note = Synthetic
KAAPLRRTT

SEQ ID NO: 2375 - protein, 9 aa, synthetic construct
  REGION 1..9: note = Synthetic
KAGKLSATG

SEQ ID NO: 2376 - protein, 9 aa, synthetic construct
  REGION 1..9: note = Synthetic
KAGTIAAPW

SEQ ID NO: 2377 - protein, 9 aa, synthetic construct
  REGION 1..9: note = Synthetic
KAKSLTTEI

SEQ ID NO: 2378 - protein, 9 aa, synthetic construct
  REGION 1..9: note = Synthetic
KATVTTVQV

SEQ ID NO: 2379 - protein, 9 aa, synthetic construct
  REGION 1..9: note = Synthetic
KDYRDKDGG

SEQ ID NO: 2380 - protein, 9 aa, synthetic construct
  REGION 1..9: note = Synthetic
KEAATIVAA

SEQ ID NO: 2381 - protein, 9 aa, synthetic construct
  REGION 1..9: note = Synthetic
KEDVDAAQI

SEQ ID NO: 2382 - protein, 9 aa, synthetic construct
  REGION 1..9: note = Synthetic
KEVDGIIQE

SEQ ID NO: 2383 - protein, 9 aa, synthetic construct
  REGION 1..9: note = Synthetic
KGPKLAMPW

SEQ ID NO: 2384 - protein, 9 aa, synthetic construct
  REGION 1..9: note = Synthetic
KLASGGGAV

SEQ ID NO: 2385 - protein, 9 aa, synthetic construct
  REGION 1..9: note = Synthetic
KLKGKNQEF

SEQ ID NO: 2386 - protein, 9 aa, synthetic construct
  REGION 1..9: note = Synthetic
KLLHHILPI

SEQ ID NO: 2387 - protein, 9 aa, synthetic construct
  REGION 1..9: note = Synthetic
KPAPQPGPQ

SEQ ID NO: 2388 - protein, 9 aa, synthetic construct
  REGION 1..9: note = Synthetic
KPAPTAPPM

SEQ ID NO: 2389 - protein, 9 aa, synthetic construct
  REGION 1..9: note = Synthetic
KPAVSVKVA

SEQ ID NO: 2390 - protein, 9 aa, synthetic construct
  REGION 1..9: note = Synthetic
KPDRAARVA

SEQ ID NO: 2391 - protein, 9 aa, synthetic construct
  REGION 1..9: note = Synthetic
KPLADIAVI

SEQ ID NO: 2392 - protein, 9 aa, synthetic construct
  REGION 1..9: note = Synthetic
KPLADIAVV

SEQ ID NO: 2393 - protein, 9 aa, synthetic construct
  REGION 1..9: note = Synthetic
KPLPKPLPV

SEQ ID NO: 2394 - protein, 9 aa, synthetic construct
  REGION 1..9: note = Synthetic
KQADRDFVW

SEQ ID NO: 2395 - protein, 9 aa, synthetic construct
  REGION 1..9: note = Synthetic
KSLPGGKLP

SEQ ID NO: 2396 - protein, 9 aa, synthetic construct
  REGION 1..9: note = Synthetic
KSYTLRYLA

SEQ ID NO: 2397 - protein, 9 aa, synthetic construct
  REGION 1..9: note = Synthetic
KTNMVVTSV

SEQ ID NO: 2398 - protein, 9 aa, synthetic construct
  REGION 1..9: note = Synthetic
KVLAPRLYL

SEQ ID NO: 2399 - protein, 9 aa, synthetic construct
  REGION 1..9: note = Synthetic
KVLSTKTTL

SEQ ID NO: 2400 - protein, 9 aa, synthetic construct
  REGION 1..9: note = Synthetic
LAAGAGLTL

SEQ ID NO: 2401 - protein, 9 aa, synthetic construct
  REGION 1..9: note = Synthetic
LAAIASAAH

SEQ ID NO: 2402 - protein, 9 aa, synthetic construct
  REGION 1..9: note = Synthetic
LAANGNGQW

SEQ ID NO: 2403 - protein, 9 aa, synthetic construct
  REGION 1..9: note = Synthetic
LAAQVTQRG

SEQ ID NO: 2404 - protein, 9 aa, synthetic construct
  REGION 1..9: note = Synthetic
LAARGDGAL

SEQ ID NO: 2405 - protein, 9 aa, synthetic construct
  REGION 1..9: note = Synthetic
LAAVLVNPH

SEQ ID NO: 2406 - protein, 9 aa, synthetic construct
  REGION 1..9: note = Synthetic
LAGSGLFRM

SEQ ID NO: 2407 - protein, 9 aa, synthetic construct
  REGION 1..9: note = Synthetic
LAKALSAAL

SEQ ID NO: 2408 - protein, 9 aa, synthetic construct
  REGION 1..9: note = Synthetic
LALQAGDAL

SEQ ID NO: 2409 - protein, 9 aa, synthetic construct
  REGION 1..9: note = Synthetic
LAMPWTFHA

SEQ ID NO: 2410 - protein, 9 aa, synthetic construct
  REGION 1..9: note = Synthetic
LANDGTIVI

SEQ ID NO: 2411 - protein, 9 aa, synthetic construct
  REGION 1..9: note = Synthetic
LAPTVGVAF

SEQ ID NO: 2412 - protein, 9 aa, synthetic construct
  REGION 1..9: note = Synthetic
LASDGSVDF

SEQ ID NO: 2413 - protein, 9 aa, synthetic construct
  REGION 1..9: note = Synthetic
LATYQSEYL

SEQ ID NO: 2414 - protein, 9 aa, synthetic construct
  REGION 1..9: note = Synthetic
LAWALMLAC

SEQ ID NO: 2415 - protein, 9 aa, synthetic construct
  REGION 1..9: note = Synthetic
LEAGRRFTH

SEQ ID NO: 2416 - protein, 9 aa, synthetic construct
  REGION 1..9: note = Synthetic
LFTQQGGAY

SEQ ID NO: 2417 - protein, 9 aa, synthetic construct
  REGION 1..9: note = Synthetic
LKRPGSSPM

SEQ ID NO: 2418 - protein, 9 aa, synthetic construct
  REGION 1..9: note = Synthetic
LLGSHVARA

SEQ ID NO: 2419 - protein, 9 aa, synthetic construct
  REGION 1..9: note = Synthetic
LLHHILPIL

SEQ ID NO: 2420 - protein, 9 aa, synthetic construct
  REGION 1..9: note = Synthetic
LLNAGGTLL

SEQ ID NO: 2421 - protein, 9 aa, synthetic construct
  REGION 1..9: note = Synthetic
LMGPLQVNA

SEQ ID NO: 2422 - protein, 9 aa, synthetic construct
  REGION 1..9: note = Synthetic
LNDSKITMG

SEQ ID NO: 2423 - protein, 9 aa, synthetic construct
  REGION 1..9: note = Synthetic
LPEPVKLTL

SEQ ID NO: 2424 - protein, 9 aa, synthetic construct
  REGION 1..9: note = Synthetic
LPILVLALL

SEQ ID NO: 2425 - protein, 9 aa, synthetic construct
  REGION 1..9: note = Synthetic
LPKISKNAL

SEQ ID NO: 2426 - protein, 9 aa, synthetic construct
  REGION 1..9: note = Synthetic
LPKPVTVKL

SEQ ID NO: 2427 - protein, 9 aa, synthetic construct
  REGION 1..9: note = Synthetic
LPLKANPMH

SEQ ID NO: 2428 - protein, 9 aa, synthetic construct
  REGION 1..9: note = Synthetic
LPPRPVVAE

SEQ ID NO: 2429 - protein, 9 aa, synthetic construct
  REGION 1..9: note = Synthetic
LPSIPGTSI

SEQ ID NO: 2430 - protein, 9 aa, synthetic construct
  REGION 1..9: note = Synthetic
LPTHLYKNF

SEQ ID NO: 2431 - protein, 9 aa, synthetic construct
  REGION 1..9: note = Synthetic
LPVRGVALV

SEQ ID NO: 2432 - protein, 9 aa, synthetic construct
  REGION 1..9: note = Synthetic
LPVSLTALD

SEQ ID NO: 2433 - protein, 9 aa, synthetic construct
  REGION 1..9: note = Synthetic
LQGGNKVPV

SEQ ID NO: 2434 - protein, 9 aa, synthetic construct
  REGION 1..9: note = Synthetic
LSAALGADW

SEQ ID NO: 2435 - protein, 9 aa, synthetic construct
  REGION 1..9: note = Synthetic
LSDAGHEHD

SEQ ID NO: 2436 - protein, 9 aa, synthetic construct
  REGION 1..9: note = Synthetic
LSGEVQRKG

SEQ ID NO: 2437 - protein, 9 aa, synthetic construct
  REGION 1..9: note = Synthetic
LSSPSAITV

SEQ ID NO: 2438 - protein, 9 aa, synthetic construct
  REGION 1..9: note = Synthetic
LTWLAILAV

SEQ ID NO: 2439 - protein, 9 aa, synthetic construct
  REGION 1..9: note = Synthetic
LVFSHVRGM

SEQ ID NO: 2440 - protein, 9 aa, synthetic construct
  REGION 1..9: note = Synthetic
LVSDAGADL

SEQ ID NO: 2441 - protein, 9 aa, synthetic construct
  REGION 1..9: note = Synthetic
LVYYESIAY

SEQ ID NO: 2442 - protein, 9 aa, synthetic construct
  REGION 1..9: note = Synthetic
MAAESTFES

SEQ ID NO: 2443 - protein, 9 aa, synthetic construct
  REGION 1..9: note = Synthetic
MAAGHDATL

SEQ ID NO: 2444 - protein, 9 aa, synthetic construct
  REGION 1..9: note = Synthetic
MAAWSERAG

SEQ ID NO: 2445 - protein, 9 aa, synthetic construct
  REGION 1..9: note = Synthetic
MALGALGAA

SEQ ID NO: 2446 - protein, 9 aa, synthetic construct
  REGION 1..9: note = Synthetic
MAPVMGACM

SEQ ID NO: 2447 - protein, 9 aa, synthetic construct
  REGION 1..9: note = Synthetic
MATKGEMQI

SEQ ID NO: 2448 - protein, 9 aa, synthetic construct
  REGION 1..9: note = Synthetic
MDAKGGTLL

SEQ ID NO: 2449 - protein, 9 aa, synthetic construct
  REGION 1..9: note = Synthetic
MESNKDIVI

SEQ ID NO: 2450 - protein, 9 aa, synthetic construct
  REGION 1..9: note = Synthetic
MEVMLRAVF

SEQ ID NO: 2451 - protein, 9 aa, synthetic construct
  REGION 1..9: note = Synthetic
MEYFKTPLP

SEQ ID NO: 2452 - protein, 9 aa, synthetic construct
  REGION 1..9: note = Synthetic
MHTIASILL

SEQ ID NO: 2453 - protein, 9 aa, synthetic construct
  REGION 1..9: note = Synthetic
MIYMSGLAV

SEQ ID NO: 2454 - protein, 9 aa, synthetic construct
  REGION 1..9: note = Synthetic
MLACTGLPL

SEQ ID NO: 2455 - protein, 9 aa, synthetic construct
  REGION 1..9: note = Synthetic
MPIDRKTLC

SEQ ID NO: 2456 - protein, 9 aa, synthetic construct
  REGION 1..9: note = Synthetic
MPKAPELDL

SEQ ID NO: 2457 - protein, 9 aa, synthetic construct
  REGION 1..9: note = Synthetic
MQRQAGLPL

SEQ ID NO: 2458 - protein, 9 aa, synthetic construct
  REGION 1..9: note = Synthetic
NALAWALML

SEQ ID NO: 2459 - protein, 9 aa, synthetic construct
  REGION 1..9: note = Synthetic
NITNKRAAL

SEQ ID NO: 2460 - protein, 9 aa, synthetic construct
  REGION 1..9: note = Synthetic
NLMAAESTF

SEQ ID NO: 2461 - protein, 9 aa, synthetic construct
  REGION 1..9: note = Synthetic
NNETMSGRQ

SEQ ID NO: 2462 - protein, 9 aa, synthetic construct
  REGION 1..9: note = Synthetic
NPGSLIAEV

SEQ ID NO: 2463 - protein, 9 aa, synthetic construct
  REGION 1..9: note = Synthetic
NPMHTIASI

SEQ ID NO: 2464 - protein, 9 aa, synthetic construct
  REGION 1..9: note = Synthetic
NPQTQLSNI

SEQ ID NO: 2465 - protein, 9 aa, synthetic construct
  REGION 1..9: note = Synthetic
NPYTSRRSV

SEQ ID NO: 2466 - protein, 9 aa, synthetic construct
  REGION 1..9: note = Synthetic
PAPTAPPMP

SEQ ID NO: 2467 - protein, 9 aa, synthetic construct
  REGION 1..9: note = Synthetic
PASANTLLL

SEQ ID NO: 2468 - protein, 9 aa, synthetic construct
  REGION 1..9: note = Synthetic
PAVALPRPL

SEQ ID NO: 2469 - protein, 9 aa, synthetic construct
  REGION 1..9: note = Synthetic
PDAHVPFCF

SEQ ID NO: 2470 - protein, 9 aa, synthetic construct
  REGION 1..9: note = Synthetic
PELGAAIRV

SEQ ID NO: 2471 - protein, 9 aa, synthetic construct
  REGION 1..9: note = Synthetic
PFIIKLKDC

SEQ ID NO: 2472 - protein, 9 aa, synthetic construct
  REGION 1..9: note = Synthetic
PGPQPPQPP

SEQ ID NO: 2473 - protein, 9 aa, synthetic construct
  REGION 1..9: note = Synthetic
PGPQPPQPQ

SEQ ID NO: 2474 - protein, 9 aa, synthetic construct
  REGION 1..9: note = Synthetic
PGPTTDYST

SEQ ID NO: 2475 - protein, 9 aa, synthetic construct
  REGION 1..9: note = Synthetic
PGTFTAGKD

SEQ ID NO: 2476 - protein, 9 aa, synthetic construct
  REGION 1..9: note = Synthetic
PGTPGDLLE

SEQ ID NO: 2477 - protein, 9 aa, synthetic construct
  REGION 1..9: note = Synthetic
PKPKPKAER

SEQ ID NO: 2478 - protein, 9 aa, synthetic construct
  REGION 1..9: note = Synthetic
PKPKPKPKA

SEQ ID NO: 2479 - protein, 9 aa, synthetic construct
  REGION 1..9: note = Synthetic
PKPKPKPKP

SEQ ID NO: 2480 - protein, 9 aa, synthetic construct
  REGION 1..9: note = Synthetic
PLPPRPVVA

SEQ ID NO: 2481 - protein, 9 aa, synthetic construct
  REGION 1..9: note = Synthetic
PPAPKPAPQ

SEQ ID NO: 2482 - protein, 9 aa, synthetic construct
  REGION 1..9: note = Synthetic
PPKPAPVAK

SEQ ID NO: 2483 - protein, 9 aa, synthetic construct
  REGION 1..9: note = Synthetic
PPRPVAAQV

SEQ ID NO: 2484 - protein, 9 aa, synthetic construct
  REGION 1..9: note = Synthetic
PPRPVVAEK

SEQ ID NO: 2485 - protein, 9 aa, synthetic construct
  REGION 1..9: note = Synthetic
PPSRPTTPP

SEQ ID NO: 2486 - protein, 9 aa, synthetic construct
  REGION 1..9: note = Synthetic
PRRARRALR

SEQ ID NO: 2487 - protein, 9 aa, synthetic construct
  REGION 1..9: note = Synthetic
QAAPLSITL

SEQ ID NO: 2488 - protein, 9 aa, synthetic construct
  REGION 1..9: note = Synthetic
QADRDFVWY

SEQ ID NO: 2489 - protein, 9 aa, synthetic construct
  REGION 1..9: note = Synthetic
QAIVVGKDL

SEQ ID NO: 2490 - protein, 9 aa, synthetic construct
  REGION 1..9: note = Synthetic
QALGALKLY

SEQ ID NO: 2491 - protein, 9 aa, synthetic construct
  REGION 1..9: note = Synthetic
QELALKLKG

SEQ ID NO: 2492 - protein, 9 aa, synthetic construct
  REGION 1..9: note = Synthetic
QITQHGGPY

SEQ ID NO: 2493 - protein, 9 aa, synthetic construct
  REGION 1..9: note = Synthetic
QITQHGSPY

SEQ ID NO: 2494 - protein, 9 aa, synthetic construct
  REGION 1..9: note = Synthetic
QPLPPRPVA

SEQ ID NO: 2495 - protein, 9 aa, synthetic construct
  REGION 1..9: note = Synthetic
QPPAGRELS

SEQ ID NO: 2496 - protein, 9 aa, synthetic construct
  REGION 1..9: note = Synthetic
QQLKQADRD

SEQ ID NO: 2497 - protein, 9 aa, synthetic construct
  REGION 1..9: note = Synthetic
QQVQVLQRQ

SEQ ID NO: 2498 - protein, 9 aa, synthetic construct
  REGION 1..9: note = Synthetic
QSIVEAPEL

SEQ ID NO: 2499 - protein, 9 aa, synthetic construct
  REGION 1..9: note = Synthetic
QVGSSNSAF

SEQ ID NO: 2500 - protein, 9 aa, synthetic construct
  REGION 1..9: note = Synthetic
RAGLSPATW

SEQ ID NO: 2501 - protein, 9 aa, synthetic construct
  REGION 1..9: note = Synthetic
RARRALRQD

SEQ ID NO: 2502 - protein, 9 aa, synthetic construct
  REGION 1..9: note = Synthetic
RASASRARI

SEQ ID NO: 2503 - protein, 9 aa, synthetic construct
  REGION 1..9: note = Synthetic
RELSAAANA

SEQ ID NO: 2504 - protein, 9 aa, synthetic construct
  REGION 1..9: note = Synthetic
RETFCITTI

SEQ ID NO: 2505 - protein, 9 aa, synthetic construct
  REGION 1..9: note = Synthetic
RGFAQRQQL

SEQ ID NO: 2506 - protein, 9 aa, synthetic construct
  REGION 1..9: note = Synthetic
RGSAATFTL

SEQ ID NO: 2507 - protein, 9 aa, synthetic construct
  REGION 1..9: note = Synthetic
RGWSIFALY

SEQ ID NO: 2508 - protein, 9 aa, synthetic construct
  REGION 1..9: note = Synthetic
RKMLYLIYV

SEQ ID NO: 2509 - protein, 9 aa, synthetic construct
  REGION 1..9: note = Synthetic
RLRKMLYLI

SEQ ID NO: 2510 - protein, 9 aa, synthetic construct
  REGION 1..9: note = Synthetic
RPQITDAVT

SEQ ID NO: 2511 - protein, 9 aa, synthetic construct
  REGION 1..9: note = Synthetic
RPSVNGGRI

SEQ ID NO: 2512 - protein, 9 aa, synthetic construct
  REGION 1..9: note = Synthetic
RRFTHADGW

SEQ ID NO: 2513 - protein, 9 aa, synthetic construct
  REGION 1..9: note = Synthetic
RSGARATSL

SEQ ID NO: 2514 - protein, 9 aa, synthetic construct
  REGION 1..9: note = Synthetic
RSRVRALAW

SEQ ID NO: 2515 - protein, 9 aa, synthetic construct
  REGION 1..9: note = Synthetic
RSRVRALSW

SEQ ID NO: 2516 - protein, 9 aa, synthetic construct
  REGION 1..9: note = Synthetic
RTHGVGASL

SEQ ID NO: 2517 - protein, 9 aa, synthetic construct
  REGION 1..9: note = Synthetic
RTRGQARSG

SEQ ID NO: 2518 - protein, 9 aa, synthetic construct
  REGION 1..9: note = Synthetic
RVAPPAVAL

SEQ ID NO: 2519 - protein, 9 aa, synthetic construct
  REGION 1..9: note = Synthetic
RVLPEPVKL

SEQ ID NO: 2520 - protein, 9 aa, synthetic construct
  REGION 1..9: note = Synthetic
RVRALAWLL

SEQ ID NO: 2521 - protein, 9 aa, synthetic construct
  REGION 1..9: note = Synthetic
RVRALSWLL

SEQ ID NO: 2522 - protein, 9 aa, synthetic construct
  REGION 1..9: note = Synthetic
RVTVSGGSL

SEQ ID NO: 2523 - protein, 9 aa, synthetic construct
  REGION 1..9: note = Synthetic
SEAMAAWSE

SEQ ID NO: 2524 - protein, 9 aa, synthetic construct
  REGION 1..9: note = Synthetic
SESHNFHAS

SEQ ID NO: 2525 - protein, 9 aa, synthetic construct
  REGION 1..9: note = Synthetic
SGEGRVNIG

SEQ ID NO: 2526 - protein, 9 aa, synthetic construct
  REGION 1..9: note = Synthetic
SGLAVRVHV

SEQ ID NO: 2527 - protein, 9 aa, synthetic construct
  REGION 1..9: note = Synthetic
SLADISLGA

SEQ ID NO: 2528 - protein, 9 aa, synthetic construct
  REGION 1..9: note = Synthetic
SLFAILSST

SEQ ID NO: 2529 - protein, 9 aa, synthetic construct
  REGION 1..9: note = Synthetic
SLFAPHGNV

SEQ ID NO: 2530 - protein, 9 aa, synthetic construct
  REGION 1..9: note = Synthetic
SLSIDNATW

SEQ ID NO: 2531 - protein, 9 aa, synthetic construct
  REGION 1..9: note = Synthetic
SPMEVMLRA

SEQ ID NO: 2532 - protein, 9 aa, synthetic construct
  REGION 1..9: note = Synthetic
SPQPIRATV

SEQ ID NO: 2533 - protein, 9 aa, synthetic construct
  REGION 1..9: note = Synthetic
SPRRARRAL

SEQ ID NO: 2534 - protein, 9 aa, synthetic construct
  REGION 1..9: note = Synthetic
SPSRLAGTL

SEQ ID NO: 2535 - protein, 9 aa, synthetic construct
  REGION 1..9: note = Synthetic
SSTPLGSLF

SEQ ID NO: 2536 - protein, 9 aa, synthetic construct
  REGION 1..9: note = Synthetic
STYELLDYL

SEQ ID NO: 2537 - protein, 9 aa, synthetic construct
  REGION 1..9: note = Synthetic
SVAMKPYEV

SEQ ID NO: 2538 - protein, 9 aa, synthetic construct
  REGION 1..9: note = Synthetic
SVAPNALAW

SEQ ID NO: 2539 - protein, 9 aa, synthetic construct
  REGION 1..9: note = Synthetic
SVKVAKKLF

SEQ ID NO: 2540 - protein, 9 aa, synthetic construct
  REGION 1..9: note = Synthetic
TAFMSGRSL

SEQ ID NO: 2541 - protein, 9 aa, synthetic construct
  REGION 1..9: note = Synthetic
TAGATPFDI

SEQ ID NO: 2542 - protein, 9 aa, synthetic construct
  REGION 1..9: note = Synthetic
TAPVTSPAW

SEQ ID NO: 2543 - protein, 9 aa, synthetic construct
  REGION 1..9: note = Synthetic
TARTGWLTW

SEQ ID NO: 2544 - protein, 9 aa, synthetic construct
  REGION 1..9: note = Synthetic
TEAQGVQVR

SEQ ID NO: 2545 - protein, 9 aa, synthetic construct
  REGION 1..9: note = Synthetic
TEVYLEHRM

SEQ ID NO: 2546 - protein, 9 aa, synthetic construct
  REGION 1..9: note = Synthetic
TFEGKPALE

SEQ ID NO: 2547 - protein, 9 aa, synthetic construct
  REGION 1..9: note = Synthetic
TFTGKVTNG

SEQ ID NO: 2548 - protein, 9 aa, synthetic construct
  REGION 1..9: note = Synthetic
TGDGGGHTD

SEQ ID NO: 2549 - protein, 9 aa, synthetic construct
  REGION 1..9: note = Synthetic
TLAKALSAA

SEQ ID NO: 2550 - protein, 9 aa, synthetic construct
  REGION 1..9: note = Synthetic
TLANVGDTW

SEQ ID NO: 2551 - protein, 9 aa, synthetic construct
  REGION 1..9: note = Synthetic
TLNASNLTL

SEQ ID NO: 2552 - protein, 9 aa, synthetic construct
  REGION 1..9: note = Synthetic
TLSSAHGNV

SEQ ID NO: 2553 - protein, 9 aa, synthetic construct
  REGION 1..9: note = Synthetic
TPFDIKLKE

SEQ ID NO: 2554 - protein, 9 aa, synthetic construct
  REGION 1..9: note = Synthetic
TPFIIKLKD

SEQ ID NO: 2555 - protein, 9 aa, synthetic construct
  REGION 1..9: note = Synthetic
TPGWSIYGL

SEQ ID NO: 2556 - protein, 9 aa, synthetic construct
  REGION 1..9: note = Synthetic
TPLGSAATF

SEQ ID NO: 2557 - protein, 9 aa, synthetic construct
  REGION 1..9: note = Synthetic
TPLGSLFAI

SEQ ID NO: 2558 - protein, 9 aa, synthetic construct
  REGION 1..9: note = Synthetic
TPLPVSLTA

SEQ ID NO: 2559 - protein, 9 aa, synthetic construct
  REGION 1..9: note = Synthetic
TRQGIMDQY

SEQ ID NO: 2560 - protein, 9 aa, synthetic construct
  REGION 1..9: note = Synthetic
TSKQDERNY

SEQ ID NO: 2561 - protein, 9 aa, synthetic construct
  REGION 1..9: note = Synthetic
TSPYDGKYW

SEQ ID NO: 2562 - protein, 9 aa, synthetic construct
  REGION 1..9: note = Synthetic
TSRRSVASI

SEQ ID NO: 2563 - protein, 9 aa, synthetic construct
  REGION 1..9: note = Synthetic
TSRTVTMRY

SEQ ID NO: 2564 - protein, 9 aa, synthetic construct
  REGION 1..9: note = Synthetic
TTEYPNARY

SEQ ID NO: 2565 - protein, 9 aa, synthetic construct
  REGION 1..9: note = Synthetic
TTEYSNARY

SEQ ID NO: 2566 - protein, 9 aa, synthetic construct
  REGION 1..9: note = Synthetic
TTLGLEQTF

SEQ ID NO: 2567 - protein, 9 aa, synthetic construct
  REGION 1..9: note = Synthetic
TVLAAGAGL

SEQ ID NO: 2568 - protein, 9 aa, synthetic construct
  REGION 1..9: note = Synthetic
TVQELALKL

SEQ ID NO: 2569 - protein, 9 aa, synthetic construct
  REGION 1..9: note = Synthetic
TVVQRNKHW

SEQ ID NO: 2570 - protein, 9 aa, synthetic construct
  REGION 1..9: note = Synthetic
VAAAADLAL

SEQ ID NO: 2571 - protein, 9 aa, synthetic construct
  REGION 1..9: note = Synthetic
VALASQARW

SEQ ID NO: 2572 - protein, 9 aa, synthetic construct
  REGION 1..9: note = Synthetic
VAMKPYEVT

SEQ ID NO: 2573 - protein, 9 aa, synthetic construct
  REGION 1..9: note = Synthetic
VARLVKLQG

SEQ ID NO: 2574 - protein, 9 aa, synthetic construct
  REGION 1..9: note = Synthetic
VAVAGGRWH

SEQ ID NO: 2575 - protein, 9 aa, synthetic construct
  REGION 1..9: note = Synthetic
VEASAITTY

SEQ ID NO: 2576 - protein, 9 aa, synthetic construct
  REGION 1..9: note = Synthetic
VEDIGGKNY

SEQ ID NO: 2577 - protein, 9 aa, synthetic construct
  REGION 1..9: note = Synthetic
VEVSSPPPV

SEQ ID NO: 2578 - protein, 9 aa, synthetic construct
  REGION 1..9: note = Synthetic
VGAGGYEAG

SEQ ID NO: 2579 - protein, 9 aa, synthetic construct
  REGION 1..9: note = Synthetic
VGGGEHGRW

SEQ ID NO: 2580 - protein, 9 aa, synthetic construct
  REGION 1..9: note = Synthetic
VHVSKEEQY

SEQ ID NO: 2581 - protein, 9 aa, synthetic construct
  REGION 1..9: note = Synthetic
VIDGQKVLA

SEQ ID NO: 2582 - protein, 9 aa, synthetic construct
  REGION 1..9: note = Synthetic
VIGACTSPY

SEQ ID NO: 2583 - protein, 9 aa, synthetic construct
  REGION 1..9: note = Synthetic
VKLGGVYEA

SEQ ID NO: 2584 - protein, 9 aa, synthetic construct
  REGION 1..9: note = Synthetic
VLAPRLYLT

SEQ ID NO: 2585 - protein, 9 aa, synthetic construct
  REGION 1..9: note = Synthetic
VLVKTNMVV

SEQ ID NO: 2586 - protein, 9 aa, synthetic construct
  REGION 1..9: note = Synthetic
VPASGAPAA

SEQ ID NO: 2587 - protein, 9 aa, synthetic construct
  REGION 1..9: note = Synthetic
VPFCFGKDL

SEQ ID NO: 2588 - protein, 9 aa, synthetic construct
  REGION 1..9: note = Synthetic
VPVSEHCTV

SEQ ID NO: 2589 - protein, 9 aa, synthetic construct
  REGION 1..9: note = Synthetic
VPVTPPKVE

SEQ ID NO: 2590 - protein, 9 aa, synthetic construct
  REGION 1..9: note = Synthetic
VRTVSAMEY

SEQ ID NO: 2591 - protein, 9 aa, synthetic construct
  REGION 1..9: note = Synthetic
VSGGSLSAP

SEQ ID NO: 2592 - protein, 9 aa, synthetic construct
  REGION 1..9: note = Synthetic
VSSATKAKG

SEQ ID NO: 2593 - protein, 9 aa, synthetic construct
  REGION 1..9: note = Synthetic
VSSPPPVSV

SEQ ID NO: 2594 - protein, 9 aa, synthetic construct
  REGION 1..9: note = Synthetic
VSVKVAKKL

SEQ ID NO: 2595 - protein, 9 aa, synthetic construct
  REGION 1..9: note = Synthetic
VTMRYLASY

SEQ ID NO: 2596 - protein, 9 aa, synthetic construct
  REGION 1..9: note = Synthetic
VTSVAMKPY

SEQ ID NO: 2597 - protein, 9 aa, synthetic construct
  REGION 1..9: note = Synthetic
VVAEKVTTP

SEQ ID NO: 2598 - protein, 9 aa, synthetic construct
  REGION 1..9: note = Synthetic
VVDGPPSRP

SEQ ID NO: 2599 - protein, 9 aa, synthetic construct
  REGION 1..9: note = Synthetic
VVETAQPLP

SEQ ID NO: 2600 - protein, 9 aa, synthetic construct
  REGION 1..9: note = Synthetic
WLTWLAILA

SEQ ID NO: 2601 - protein, 9 aa, synthetic construct
  REGION 1..9: note = Synthetic
WTFHAGYRY

SEQ ID NO: 2602 - protein, 9 aa, synthetic construct
  REGION 1..9: note = Synthetic
WVMTDNSNV

SEQ ID NO: 2603 - protein, 9 aa, synthetic construct
  REGION 1..9: note = Synthetic
YAEHGEVSI

SEQ ID NO: 2604 - protein, 9 aa, synthetic construct
  REGION 1..9: note = Synthetic
YAIDGTAAG

SEQ ID NO: 2605 - protein, 9 aa, synthetic construct
  REGION 1..9: note = Synthetic
YALKSRIAL

SEQ ID NO: 2606 - protein, 9 aa, synthetic construct
  REGION 1..9: note = Synthetic
YATNPQTQL

SEQ ID NO: 2607 - protein, 9 aa, synthetic construct
  REGION 1..9: note = Synthetic
YDTGDLIAY

SEQ ID NO: 2608 - protein, 9 aa, synthetic construct
  REGION 1..9: note = Synthetic
YEAGFSLGS

SEQ ID NO: 2609 - protein, 9 aa, synthetic construct
  REGION 1..9: note = Synthetic
YEDATFETY

SEQ ID NO: 2610 - protein, 9 aa, synthetic construct
  REGION 1..9: note = Synthetic
YENKSSTPL

SEQ ID NO: 2611 - protein, 9 aa, synthetic construct
  REGION 1..9: note = Synthetic
YEVTPTRML

SEQ ID NO: 2612 - protein, 9 aa, synthetic construct
  REGION 1..9: note = Synthetic
YEYIWGLYP

SEQ ID NO: 2613 - protein, 9 aa, synthetic construct
  REGION 1..9: note = Synthetic
YEYIWGLYQ

SEQ ID NO: 2614 - protein, 9 aa, synthetic construct
  REGION 1..9: note = Synthetic
YEYSKGPKL

SEQ ID NO: 2615 - protein, 9 aa, synthetic construct
  REGION 1..9: note = Synthetic
YFEPGPTTD

SEQ ID NO: 2616 - protein, 9 aa, synthetic construct
  REGION 1..9: note = Synthetic
YIWGLYPTY

SEQ ID NO: 2617 - protein, 9 aa, synthetic construct
  REGION 1..9: note = Synthetic
YIWGLYQTY

SEQ ID NO: 2618 - protein, 9 aa, synthetic construct
  REGION 1..9: note = Synthetic
YLRQITPGW

SEQ ID NO: 2619 - protein, 9 aa, synthetic construct
  REGION 1..9: note = Synthetic
YMIYMSGLA

SEQ ID NO: 2620 - protein, 9 aa, synthetic construct
  REGION 1..9: note = Synthetic
YPALRAALI

SEQ ID NO: 2621 - protein, 9 aa, synthetic construct
  REGION 1..9: note = Synthetic
YPGTPGDLL

SEQ ID NO: 2622 - protein, 9 aa, synthetic construct
  REGION 1..9: note = Synthetic
YPTYTEWSV

SEQ ID NO: 2623 - protein, 9 aa, synthetic construct
  REGION 1..9: note = Synthetic
YQTYTEWSV

SEQ ID NO: 2624 - protein, 9 aa, synthetic construct
  REGION 1..9: note = Synthetic
YSTGDLRAY

SEQ ID NO: 2625 - protein, 9 aa, synthetic construct
  REGION 1..9: note = Synthetic
YTLRYLASY

SEQ ID NO: 2626 - protein, 9 aa, synthetic construct
  REGION 1..9: note = Synthetic
YVLVKTNMV

SEQ ID NO: 2627 - protein, 9 aa, synthetic construct
  REGION 1..9: note = Synthetic
YYDYEDATF

SEQ ID NO: 2628 - protein, 15 aa, synthetic construct
  REGION 1..15: note = Synthetic
AAFIALYPNSQLAPT

SEQ ID NO: 2629 - protein, 14 aa, synthetic construct
  REGION 1..14: note = Synthetic
GGAEYNLALGQRRA

SEQ ID NO: 2630 - protein, 16 aa, synthetic construct
  REGION 1..16: note = Synthetic
GGAEYNLALGQRRADA

SEQ ID NO: 2631 - protein, 12 aa, synthetic construct
  REGION 1..12: note = Synthetic
IALYPNSQLAPT

SEQ ID NO: 2632 - protein, 18 aa, synthetic construct
  REGION 1..18: note = Synthetic
KPDQGEVVAVGPGKKTED

SEQ ID NO: 2633 - protein, 19 aa, synthetic construct
  REGION 1..19: note = Synthetic
KPDQGEVVAVGPGKKTEDG

SEQ ID NO: 2634 - protein, 14 aa, synthetic construct
  REGION 1..14: note = Synthetic
LAEVLDYHNFVLTQ

SEQ ID NO: 2635 - protein, 15 aa, synthetic construct
  REGION 1..15: note = Synthetic
QSIALSSLMVAQAIP

SEQ ID NO: 2636 - protein, 23 aa, synthetic construct
  REGION 1..23: note = Synthetic
SIGVLGYQKTVDHTKVNSKLSLF

SEQ ID NO: 2637 - protein, 14 aa, synthetic construct
  REGION 1..14: note = Synthetic
AAHADWNNQSIVKT

SEQ ID NO: 2638 - protein, 6 aa, synthetic construct
  REGION 1..6: note = Synthetic
AALGRG

SEQ ID NO: 2639 - protein, 14 aa, synthetic construct
  REGION 1..14: note = Synthetic
AALGRGHSLYASYE

SEQ ID NO: 2640 - protein, 14 aa, synthetic construct
  REGION 1..14: note = Synthetic
AAPLRRTTLAMALG

SEQ ID NO: 2641 - protein, 14 aa, synthetic construct
  REGION 1..14: note = Synthetic
AAPLSITLQAGAHA

SEQ ID NO: 2642 - protein, 14 aa, synthetic construct
  REGION 1..14: note = Synthetic
ADAQGDIVATELPS

SEQ ID NO: 2643 - protein, 14 aa, synthetic construct
  REGION 1..14: note = Synthetic
ADSGFYLDATLRAS

SEQ ID NO: 2644 - protein, 4 aa, synthetic construct
  REGION 1..4: note = Synthetic
AELA

SEQ ID NO: 2645 - protein, 14 aa, synthetic construct
  REGION 1..14: note = Synthetic
AELAVFRAGGGAYR

SEQ ID NO: 2646 - protein, 14 aa, synthetic construct
  REGION 1..14: note = Synthetic
AELQFRNGSVTSSG

SEQ ID NO: 2647 - protein, 14 aa, synthetic construct
  REGION 1..14: note = Synthetic
AGGRWHLGGLAGYT

SEQ ID NO: 2648 - protein, 14 aa, synthetic construct
  REGION 1..14: note = Synthetic
AGVAAMQGAVVHLQ

SEQ ID NO: 2649 - protein, 14 aa, synthetic construct
  REGION 1..14: note = Synthetic
AGYTRGDRGFTGDG

SEQ ID NO: 2650 - protein, 14 aa, synthetic construct
  REGION 1..14: note = Synthetic
ALASQARWTGATRA

SEQ ID NO: 2651 - protein, 14 aa, synthetic construct
  REGION 1..14: note = Synthetic
AMPWTFHAGYRYSW

SEQ ID NO: 2652 - protein, 20 aa, synthetic construct
  REGION 1..20: note = Synthetic
AMQGAVVHLQRATIRRGDAP

SEQ ID NO: 2653 - protein, 9 aa, synthetic construct
  REGION 1..9: note = Synthetic
ANGLRVRDE

SEQ ID NO: 2654 - protein, 14 aa, synthetic construct
  REGION 1..14: note = Synthetic
ANGLRVRDEGGSSV

SEQ ID NO: 2655 - protein, 14 aa, synthetic construct
  REGION 1..14: note = Synthetic
ANKDGKVDIGTYRY

SEQ ID NO: 2656 - protein, 14 aa, synthetic construct
  REGION 1..14: note = Synthetic
APAAVSVLGASELT

SEQ ID NO: 2657 - protein, 14 aa, synthetic construct
  REGION 1..14: note = Synthetic
APPAPKPAPQPGPQ

SEQ ID NO: 2658 - protein, 14 aa, synthetic construct
  REGION 1..14: note = Synthetic
AQGILLENPAAELQ

SEQ ID NO: 2659 - protein, 14 aa, synthetic construct
  REGION 1..14: note = Synthetic
ARWTGATRAVDSLS

SEQ ID NO: 2660 - protein, 14 aa, synthetic construct
  REGION 1..14: note = Synthetic
ASLEAGRRFTHADG

SEQ ID NO: 2661 - protein, 14 aa, synthetic construct
  REGION 1..14: note = Synthetic
ASYEYSKGPKLAMP

SEQ ID NO: 2662 - protein, 9 aa, synthetic construct
  REGION 1..9: note = Synthetic
ATFTLANKD

SEQ ID NO: 2663 - protein, 14 aa, synthetic construct
  REGION 1..14: note = Synthetic
ATFTLANKDGKVDI

SEQ ID NO: 2664 - protein, 14 aa, synthetic construct
  REGION 1..14: note = Synthetic
ATRAVDSLSIDNAT

SEQ ID NO: 2665 - protein, 15 aa, synthetic construct
  REGION 1..15: note = Synthetic
DDDGIALYVAGEQAQ

SEQ ID NO: 2666 - protein, 14 aa, synthetic construct
  REGION 1..14: note = Synthetic
DDGIALYVAGEQAQ

SEQ ID NO: 2667 - protein, 14 aa, synthetic construct
  REGION 1..14: note = Synthetic
DGGHITGGRAAGVA

SEQ ID NO: 2668 - protein, 16 aa, synthetic construct
  REGION 1..16: note = Synthetic
DGIRRFLGTVTVKAGK

SEQ ID NO: 2669 - protein, 14 aa, synthetic construct
  REGION 1..14: note = Synthetic
DGSVDFQQPAEAGR

SEQ ID NO: 2670 - protein, 14 aa, synthetic construct
  REGION 1..14: note = Synthetic
DGYAVKGKYRTHGV

SEQ ID NO: 2671 - protein, 14 aa, synthetic construct
  REGION 1..14: note = Synthetic
DIVATELPSIPGTS

SEQ ID NO: 2672 - protein, 14 aa, synthetic construct
  REGION 1..14: note = Synthetic
DKLVVMQDASGQHR

SEQ ID NO: 2673 - protein, 14 aa, synthetic construct
  REGION 1..14: note = Synthetic
DLGLSDKLVVMQDA

SEQ ID NO: 2674 - protein, 15 aa, synthetic construct
  REGION 1..15: note = Synthetic
DNATWVMTDNSNVGA

SEQ ID NO: 2675 - protein, 19 aa, synthetic construct
  REGION 1..19: note = Synthetic
DNATWVMTDNSNVGALRLA

SEQ ID NO: 2676 - protein, 14 aa, synthetic construct
  REGION 1..14: note = Synthetic
DNRAGRRFDQKVAG

SEQ ID NO: 2677 - protein, 14 aa, synthetic construct
  REGION 1..14: note = Synthetic
EAGRFKVLTVNTLA

SEQ ID NO: 2678 - protein, 14 aa, synthetic construct
  REGION 1..14: note = Synthetic
ELAQSIVEAPELGA

SEQ ID NO: 2679 - protein, 14 aa, synthetic construct
  REGION 1..14: note = Synthetic
ELGAAIRVGRGARV

SEQ ID NO: 2680 - protein, 14 aa, synthetic construct
  REGION 1..14: note = Synthetic
ELGADHAVAVAGGR

SEQ ID NO: 2681 - protein, 14 aa, synthetic construct
  REGION 1..14: note = Synthetic
ELPSIPGTSIGPLD

SEQ ID NO: 2682 - protein, 14 aa, synthetic construct
  REGION 1..14: note = Synthetic
EPVKLTLTGGADAQ

SEQ ID NO: 2683 - protein, 14 aa, synthetic construct
  REGION 1..14: note = Synthetic
EQAQASIADSTLQG

SEQ ID NO: 2684 - protein, 14 aa, synthetic construct
  REGION 1..14: note = Synthetic
ERGANVTVQRSAIV

SEQ ID NO: 2685 - protein, 14 aa, synthetic construct
  REGION 1..14: note = Synthetic
ERQHGIHIQGSDPG

SEQ ID NO: 2686 - protein, 14 aa, synthetic construct
  REGION 1..14: note = Synthetic
EVGKRIELAGGRQV

SEQ ID NO: 2687 - protein, 14 aa, synthetic construct
  REGION 1..14: note = Synthetic
FDGAGTVHTNGIAH

SEQ ID NO: 2688 - protein, 14 aa, synthetic construct
  REGION 1..14: note = Synthetic
FQQPAEAGRFKVLT

SEQ ID NO: 2689 - protein, 14 aa, synthetic construct
  REGION 1..14: note = Synthetic
FRAGGGAYRAANGL

SEQ ID NO: 2690 - protein, 14 aa, synthetic construct
  REGION 1..14: note = Synthetic
GAHAQGKALLYRVL

SEQ ID NO: 2691 - protein, 14 aa, synthetic construct
  REGION 1..14: note = Synthetic
GARVTVSGGSLSAP

SEQ ID NO: 2692 - protein, 14 aa, synthetic construct
  REGION 1..14: note = Synthetic
GAYRAANGLRVRDE

SEQ ID NO: 2693 - protein, 14 aa, synthetic construct
  REGION 1..14: note = Synthetic
GDAPAGGAVPGGAV

SEQ ID NO: 2694 - protein, 14 aa, synthetic construct
  REGION 1..14: note = Synthetic
GGAVPGGAVPGGFG

SEQ ID NO: 2695 - protein, 14 aa, synthetic construct
  REGION 1..14: note = Synthetic
GGAVPGGFGPVLDG

SEQ ID NO: 2696 - protein, 14 aa, synthetic construct
  REGION 1..14: note = Synthetic
GGFGPVLDGWYGVD

SEQ ID NO: 2697 - protein, 14 aa, synthetic construct
  REGION 1..14: note = Synthetic
GGLHIGALQSLQPE

SEQ ID NO: 2698 - protein, 14 aa, synthetic construct
  REGION 1..14: note = Synthetic
GGVQIERGANVTVQ

SEQ ID NO: 2699 - protein, 14 aa, synthetic construct
  REGION 1..14: note = Synthetic
GHSLYASYEYSKGP

SEQ ID NO: 2700 - protein, 14 aa, synthetic construct
  REGION 1..14: note = Synthetic
GHTDSVHVGGYATY

SEQ ID NO: 2701 - protein, 14 aa, synthetic construct
  REGION 1..14: note = Synthetic
GIAHRTELRGTRAE

SEQ ID NO: 2702 - protein, 14 aa, synthetic construct
  REGION 1..14: note = Synthetic
GKALLYRVLPEPVK

SEQ ID NO: 2703 - protein, 14 aa, synthetic construct
  REGION 1..14: note = Synthetic
GLGMAAALGRGHSL

SEQ ID NO: 2704 - protein, 14 aa, synthetic construct
  REGION 1..14: note = Synthetic
GNVIETGGARRFAP

SEQ ID NO: 2705 - protein, 14 aa, synthetic construct
  REGION 1..14: note = Synthetic
GPLDVALASQARWT

SEQ ID NO: 2706 - protein, 9 aa, synthetic construct
  REGION 1..9: note = Synthetic
GQHRLWVRN

SEQ ID NO: 2707 - protein, 14 aa, synthetic construct
  REGION 1..14: note = Synthetic
GRGFAQRQQLDNRA

SEQ ID NO: 2708 - protein, 14 aa, synthetic construct
  REGION 1..14: note = Synthetic
GRLGLEVGKRIELA

SEQ ID NO: 2709 - protein, 14 aa, synthetic construct
  REGION 1..14: note = Synthetic
GRQVQPYIKASVLQ

SEQ ID NO: 2710 - protein, 19 aa, synthetic construct
  REGION 1..19: note = Synthetic
GRRFTHADGWFLEPQAELA

SEQ ID NO: 2711 - protein, 14 aa, synthetic construct
  REGION 1..14: note = Synthetic
GSEPASANTLLLVQ

SEQ ID NO: 2712 - protein, 14 aa, synthetic construct
  REGION 1..14: note = Synthetic
GSSVLGRLGLEVGK

SEQ ID NO: 2713 - protein, 14 aa, synthetic construct
  REGION 1..14: note = Synthetic
GTTIKVSGRQAQGI

SEQ ID NO: 2714 - protein, 14 aa, synthetic construct
  REGION 1..14: note = Synthetic
GTVTVKAGKLVADH

SEQ ID NO: 2715 - protein, 14 aa, synthetic construct
  REGION 1..14: note = Synthetic
HAVAVAGGRWHLGG

SEQ ID NO: 2716 - protein, 14 aa, synthetic construct
  REGION 1..14: note = Synthetic
IELAGGRQVQPYIK

SEQ ID NO: 2717 - protein, 14 aa, synthetic construct
  REGION 1..14: note = Synthetic
IHIQGSDPGGVRTA

SEQ ID NO: 2718 - protein, 14 aa, synthetic construct
  REGION 1..14: note = Synthetic
IRRFLGTVTVKAGK

SEQ ID NO: 2719 - protein, 14 aa, synthetic construct
  REGION 1..14: note = Synthetic
IRVGRGARVTVSGG

SEQ ID NO: 2720 - protein, 9 aa, synthetic construct
  REGION 1..9: note = Synthetic
ITLQAGAHA

SEQ ID NO: 2721 - protein, 14 aa, synthetic construct
  REGION 1..14: note = Synthetic
ITLQAGAHAQGKAL

SEQ ID NO: 2722 - protein, 14 aa, synthetic construct
  REGION 1..14: note = Synthetic
IVEAPELGAAIRVG

SEQ ID NO: 2723 - protein, 14 aa, synthetic construct
  REGION 1..14: note = Synthetic
IVKTGERQHGIHIQ

SEQ ID NO: 2724 - protein, 14 aa, synthetic construct
  REGION 1..14: note = Synthetic
KAGKLVADHATLAN

SEQ ID NO: 2725 - protein, 14 aa, synthetic construct
  REGION 1..14: note = Synthetic
KGKYRTHGVGASLE

SEQ ID NO: 2726 - protein, 14 aa, synthetic construct
  REGION 1..14: note = Synthetic
KPAPQPGPQPPQPP

SEQ ID NO: 2727 - protein, 14 aa, synthetic construct
  REGION 1..14: note = Synthetic
KVAGFELGADHAVA

SEQ ID NO: 2728 - protein, 14 aa, synthetic construct
  REGION 1..14: note = Synthetic
KVAGSDGYAVKGKY

SEQ ID NO: 2729 - protein, 14 aa, synthetic construct
  REGION 1..14: note = Synthetic
KVDIGTYRYRLAAN

SEQ ID NO: 2730 - protein, 14 aa, synthetic construct
  REGION 1..14: note = Synthetic
KVLTVNTLAGSGLF

SEQ ID NO: 2731 - protein, 14 aa, synthetic construct
  REGION 1..14: note = Synthetic
LAANGNGQWSLVGA

SEQ ID NO: 2732 - protein, 14 aa, synthetic construct
  REGION 1..14: note = Synthetic
LAMPWTFHAGYRYS

SEQ ID NO: 2733 - protein, 14 aa, synthetic construct
  REGION 1..14: note = Synthetic
LASTLWYAESNALS

SEQ ID NO: 2734 - protein, 14 aa, synthetic construct
  REGION 1..14: note = Synthetic
LENDFKVAGSDGYA

SEQ ID NO: 2735 - protein, 14 aa, synthetic construct
  REGION 1..14: note = Synthetic
LENPAAELQFRNGS

SEQ ID NO: 2736 - protein, 14 aa, synthetic construct
  REGION 1..14: note = Synthetic
LGAAPAAHADWNNQ

SEQ ID NO: 2737 - protein, 18 aa, synthetic construct
  REGION 1..18: note = Synthetic
LGGLAGYTRGDRGFTGDG

SEQ ID NO: 2738 - protein, 5 aa, synthetic construct
  REGION 1..5: note = Synthetic
LLENP

SEQ ID NO: 2739 - protein, 14 aa, synthetic construct
  REGION 1..14: note = Synthetic
LLVQTPLGSAATFT

SEQ ID NO: 2740 - protein, 14 aa, synthetic construct
  REGION 1..14: note = Synthetic
LPPSRVVLRDTNVT

SEQ ID NO: 2741 - protein, 9 aa, synthetic construct
  REGION 1..9: note = Synthetic
LQPEDLPPS

SEQ ID NO: 2742 - protein, 14 aa, synthetic construct
  REGION 1..14: note = Synthetic
LQPEDLPPSRVVLR

SEQ ID NO: 2743 - protein, 14 aa, synthetic construct
  REGION 1..14: note = Synthetic
LRASRLENDFKVAG

SEQ ID NO: 2744 - protein, 14 aa, synthetic construct
  REGION 1..14: note = Synthetic
LRLASDGSVDFQQP

SEQ ID NO: 2745 - protein, 14 aa, synthetic construct
  REGION 1..14: note = Synthetic
LSAAANAAVNTGGV

SEQ ID NO: 2746 - protein, 14 aa, synthetic construct
  REGION 1..14: note = Synthetic
LSAPHGNVIETGGA

SEQ ID NO: 2747 - protein, 14 aa, synthetic construct
  REGION 1..14: note = Synthetic
LSDDGIRRFLGTVT

SEQ ID NO: 2748 - protein, 14 aa, synthetic construct
  REGION 1..14: note = Synthetic
LVGAKAPPAPKPAP

SEQ ID NO: 2749 - protein, 14 aa, synthetic construct
  REGION 1..14: note = Synthetic
LYVAGEQAQASIAD

SEQ ID NO: 2750 - protein, 14 aa, synthetic construct
  REGION 1..14: note = Synthetic
MALGALGAAPAAHA

SEQ ID NO: 2751 - protein, 14 aa, synthetic construct
  REGION 1..14: note = Synthetic
MNMSLSRIVKAAPL

SEQ ID NO: 2752 - protein, 9 aa, synthetic construct
  REGION 1..9: note = Synthetic
MQDASGQHR

SEQ ID NO: 2753 - protein, 14 aa, synthetic construct
  REGION 1..14: note = Synthetic
MQGAVVHLQRATIR

SEQ ID NO: 2754 - protein, 14 aa, synthetic construct
  REGION 1..14: note = Synthetic
NAAVNTGGVGLAST

SEQ ID NO: 2755 - protein, 14 aa, synthetic construct
  REGION 1..14: note = Synthetic
NALSKRLGELRLNP

SEQ ID NO: 2756 - protein, 14 aa, synthetic construct
  REGION 1..14: note = Synthetic
NGQWSLVGAKAPPA

SEQ ID NO: 2757 - protein, 14 aa, synthetic construct
  REGION 1..14: note = Synthetic
NTLAGSGLFRMNVF

SEQ ID NO: 2758 - protein, 14 aa, synthetic construct
  REGION 1..14: note = Synthetic
PAGRELSAAANAAV

SEQ ID NO: 2759 - protein, 14 aa, synthetic construct
  REGION 1..14: note = Synthetic
PAPQPPAGRELSAA

SEQ ID NO: 2760 - protein, 14 aa, synthetic construct
  REGION 1..14: note = Synthetic
PGPQPPQPPQPQPE

SEQ ID NO: 2761 - protein, 14 aa, synthetic construct
  REGION 1..14: note = Synthetic
PGTSIGPLDVALAS

SEQ ID NO: 2762 - protein, 14 aa, synthetic construct
  REGION 1..14: note = Synthetic
PLGSAATFTLANKD

SEQ ID NO: 2763 - protein, 14 aa, synthetic construct
  REGION 1..14: note = Synthetic
PQPEAPAPQPPAGR

SEQ ID NO: 2764 - protein, 14 aa, synthetic construct
  REGION 1..14: note = Synthetic
PQPPQPQPEAPAPQ

SEQ ID NO: 2765 - protein, 14 aa, synthetic construct
  REGION 1..14: note = Synthetic
PYIKASVLQEFDGA

SEQ ID NO: 2766 - protein, 14 aa, synthetic construct
  REGION 1..14: note = Synthetic
RFAPQAAPLSITLQ

SEQ ID NO: 2767 - protein, 14 aa, synthetic construct
  REGION 1..14: note = Synthetic
RLGELRLNPDAGGA

SEQ ID NO: 2768 - protein, 14 aa, synthetic construct
  REGION 1..14: note = Synthetic
RLNPDAGGAWGRGF

SEQ ID NO: 2769 - protein, 14 aa, synthetic construct
  REGION 1..14: note = Synthetic
RNGSVTSSGQLSDD

SEQ ID NO: 2770 - protein, 14 aa, synthetic construct
  REGION 1..14: note = Synthetic
RRFDQKVAGFELGA

SEQ ID NO: 2771 - protein, 14 aa, synthetic construct
  REGION 1..14: note = Synthetic
RTTLAMALGALGAA

SEQ ID NO: 2772 - protein, 14 aa, synthetic construct
  REGION 1..14: note = Synthetic
SAIVDGGLHIGALQ

SEQ ID NO: 2773 - protein, 14 aa, synthetic construct
  REGION 1..14: note = Synthetic
SANTLLLVQTPLGS

SEQ ID NO: 2774 - protein, 14 aa, synthetic construct
  REGION 1..14: note = Synthetic
SDPGGVRTASGTTI

SEQ ID NO: 2775 - protein, 14 aa, synthetic construct
  REGION 1..14: note = Synthetic
SELTLDGGHITGGR

SEQ ID NO: 2776 - protein, 9 aa, synthetic construct
  REGION 1..9: note = Synthetic
SGLFRMNVF

SEQ ID NO: 2777 - protein, 14 aa, synthetic construct
  REGION 1..14: note = Synthetic
SGLFRMNVFADLGL

SEQ ID NO: 2778 - protein, 14 aa, synthetic construct
  REGION 1..14: note = Synthetic
SGSSVELAQSIVEA

SEQ ID NO: 2779 - protein, 14 aa, synthetic construct
  REGION 1..14: note = Synthetic
SIADSTLQGAGGVQ

SEQ ID NO: 2780 - protein, 14 aa, synthetic construct
  REGION 1..14: note = Synthetic
SKGPKLAMPWTFHA

SEQ ID NO: 2781 - protein, 14 aa, synthetic construct
  REGION 1..14: note = Synthetic
SNVGALRLASDGSV

SEQ ID NO: 2782 - protein, 14 aa, synthetic construct
  REGION 1..14: note = Synthetic
SRIVKAAPLRRTTL

SEQ ID NO: 2783 - protein, 14 aa, synthetic construct
  REGION 1..14: note = Synthetic
SVLGASELTLDGGH

SEQ ID NO: 2784 - protein, 9 aa, synthetic construct
  REGION 1..9: note = Synthetic
SVLQEFDGA

SEQ ID NO: 2785 - protein, 14 aa, synthetic construct
  REGION 1..14: note = Synthetic
SVLQEFDGAGTVHT

SEQ ID NO: 2786 - protein, 4 aa, synthetic construct
  REGION 1..4: note = Synthetic
TELR

SEQ ID NO: 2787 - protein, 14 aa, synthetic construct
  REGION 1..14: note = Synthetic
TELRGTRAELGLGM

SEQ ID NO: 2788 - protein, 14 aa, synthetic construct
  REGION 1..14: note = Synthetic
TGDGGGHTDSVHVG

SEQ ID NO: 2789 - protein, 14 aa, synthetic construct
  REGION 1..14: note = Synthetic
TGGARRFAPQAAPL

SEQ ID NO: 2790 - protein, 14 aa, synthetic construct
  REGION 1..14: note = Synthetic
TGGRAAGVAAMQGA

SEQ ID NO: 2791 - protein, 14 aa, synthetic construct
  REGION 1..14: note = Synthetic
TGGVGLASTLWYAE

SEQ ID NO: 2792 - protein, 14 aa, synthetic construct
  REGION 1..14: note = Synthetic
THGVGASLEAGRRF

SEQ ID NO: 2793 - protein, 9 aa, synthetic construct
  REGION 1..9: note = Synthetic
TIRRGDAPA

SEQ ID NO: 2794 - protein, 14 aa, synthetic construct
  REGION 1..14: note = Synthetic
TLANVGDTWDDDGI

SEQ ID NO: 2795 - protein, 14 aa, synthetic construct
  REGION 1..14: note = Synthetic
TLQGAGGVQIERGA

SEQ ID NO: 2796 - protein, 14 aa, synthetic construct
  REGION 1..14: note = Synthetic
TLTGGADAQGDIVA

SEQ ID NO: 2797 - protein, 14 aa, synthetic construct
  REGION 1..14: note = Synthetic
TNVTAVPASGAPAA

SEQ ID NO: 2798 - protein, 14 aa, synthetic construct
  REGION 1..14: note = Synthetic
TRAELGLGMAAALG

SEQ ID NO: 2799 - protein, 14 aa, synthetic construct
  REGION 1..14: note = Synthetic
TSSGQLSDDGIRRF

SEQ ID NO: 2800 - protein, 14 aa, synthetic construct
  REGION 1..14: note = Synthetic
TVHTNGIAHRTELR

SEQ ID NO: 2801 - protein, 14 aa, synthetic construct
  REGION 1..14: note = Synthetic
TYRYRLAANGNGQW

SEQ ID NO: 2802 - protein, 14 aa, synthetic construct
  REGION 1..14: note = Synthetic
VADHATLANVGDTW

SEQ ID NO: 2803 - protein, 14 aa, synthetic construct
  REGION 1..14: note = Synthetic
VHVGGYATYIADSG

SEQ ID NO: 2804 - protein, 9 aa, synthetic construct
  REGION 1..9: note = Synthetic
VLDGWYGVD

SEQ ID NO: 2805 - protein, 14 aa, synthetic construct
  REGION 1..14: note = Synthetic
VPASGAPAAVSVLG

SEQ ID NO: 2806 - protein, 14 aa, synthetic construct
  REGION 1..14: note = Synthetic
VRDEGGSSVLGRLG

SEQ ID NO: 2807 - protein, 14 aa, synthetic construct
  REGION 1..14: note = Synthetic
VRTASGTTIKVSGR

SEQ ID NO: 2808 - protein, 14 aa, synthetic construct
  REGION 1..14: note = Synthetic
VSGGSLSAPHGNVI

SEQ ID NO: 2809 - protein, 14 aa, synthetic construct
  REGION 1..14: note = Synthetic
VSGRQAQGILLENP

SEQ ID NO: 2810 - protein, 14 aa, synthetic construct
  REGION 1..14: note = Synthetic
VTVQRSAIVDGGLH

SEQ ID NO: 2811 - protein, 14 aa, synthetic construct
  REGION 1..14: note = Synthetic
VVLRDTNVTAVPAS

SEQ ID NO: 2812 - protein, 14 aa, synthetic construct
  REGION 1..14: note = Synthetic
WNNQSIVKTGERQH

SEQ ID NO: 2813 - protein, 14 aa, synthetic construct
  REGION 1..14: note = Synthetic
WVRNSGSEPASANT

SEQ ID NO: 2814 - protein, 14 aa, synthetic construct
  REGION 1..14: note = Synthetic
WYAESNALSKRLGE

SEQ ID NO: 2815 - protein, 14 aa, synthetic construct
  REGION 1..14: note = Synthetic
YATYIADSGFYLDA

SEQ ID NO: 2816 - protein, 9 aa, synthetic construct
  REGION 1..9: note = Synthetic
YGVDVSGSS

SEQ ID NO: 2817 - protein, 14 aa, synthetic construct
  REGION 1..14: note = Synthetic
YGVDVSGSSVELAQ

SEQ ID NO: 2818 - protein, 14 aa, synthetic construct
  REGION 1..14: note = Synthetic
YLDATLRASRLEND

SEQ ID NO: 2819 - protein, 14 aa, synthetic construct
  REGION 1..14: note = Synthetic
YRVLPEPVKLTLTG

SEQ ID NO: 2820 - protein, 16 aa, synthetic construct
  REGION 1..16: note = Synthetic
VKAQNITNKRAALIEA

SEQ ID NO: 2821 - protein, 16 aa, synthetic construct
  REGION 1..16: note = Synthetic
YYSNVTATRLLSSTNS

SEQ ID NO: 2822 - protein, 15 aa, synthetic construct
  REGION 1..15: note = Synthetic
SPNLTDERAAQAGVT

SEQ ID NO: 2823 - protein, 15 aa, synthetic construct
  REGION 1..15: note = Synthetic
SSRASDERAAHLPTS

SEQ ID NO: 2824 - protein, 15 aa, synthetic construct
  REGION 1..15: note = Synthetic
QVVHNSYNRPAYSPG

SEQ ID NO: 2825 - protein, 9 aa, synthetic construct
  REGION 1..9: note = Synthetic
AEGGEIHEL

SEQ ID NO: 2826 - protein, 12 aa, synthetic construct
  REGION 1..12: note = Synthetic
AENLISNGIGKY

SEQ ID NO: 2827 - protein, 9 aa, synthetic construct
  REGION 1..9: note = Synthetic
AEVDGDVKL

SEQ ID NO: 2828 - protein, 9 aa, synthetic construct
  REGION 1..9: note = Synthetic
AIYTAEIHK

SEQ ID NO: 2829 - protein, 9 aa, synthetic construct
  REGION 1..9: note = Synthetic
APVFHMTNY

SEQ ID NO: 2830 - protein, 16 aa, synthetic construct
  REGION 1..16: note = Synthetic
APVFHMTNYLEQPVSN

SEQ ID NO: 2831 - protein, 8 aa, synthetic construct
  REGION 1..8: note = Synthetic
AQRLNEIY

SEQ ID NO: 2832 - protein, 9 aa, synthetic construct
  REGION 1..9: note = Synthetic
ARVPHAYSL

SEQ ID NO: 2833 - protein, 9 aa, synthetic construct
  REGION 1..9: note = Synthetic
AVRDLERAM

SEQ ID NO: 2834 - protein, 13 aa, synthetic construct
  REGION 1..13: note = Synthetic
AVRDLERAMTTLK

SEQ ID NO: 2835 - protein, 9 aa, synthetic construct
  REGION 1..9: note = Synthetic
DALLRLQAM

SEQ ID NO: 2836 - protein, 9 aa, synthetic construct
  REGION 1..9: note = Synthetic
DIKEKVINL

SEQ ID NO: 2837 - protein, 8 aa, synthetic construct
  REGION 1..8: note = Synthetic
DQGLFKVL

SEQ ID NO: 2838 - protein, 9 aa, synthetic construct
  REGION 1..9: note = Synthetic
DTGVDTRIW

SEQ ID NO: 2839 - protein, 12 aa, synthetic construct
  REGION 1..12: note = Synthetic
EPIGSLAIEEAM

SEQ ID NO: 2840 - protein, 10 aa, synthetic construct
  REGION 1..10: note = Synthetic
EPIRDALNAM

SEQ ID NO: 2841 - protein, 8 aa, synthetic construct
  REGION 1..8: note = Synthetic
FPKLGKTL

SEQ ID NO: 2842 - protein, 9 aa, synthetic construct
  REGION 1..9: note = Synthetic
FRSVNAVAF

SEQ ID NO: 2843 - protein, 10 aa, synthetic construct
  REGION 1..10: note = Synthetic
GKIIDNTEQL

SEQ ID NO: 2844 - protein, 9 aa, synthetic construct
  REGION 1..9: note = Synthetic
GLNEKLVFY

SEQ ID NO: 2845 - protein, 11 aa, synthetic construct
  REGION 1..11: note = Synthetic
GMYGGTYLVEK

SEQ ID NO: 2846 - protein, 14 aa, synthetic construct
  REGION 1..14: note = Synthetic
GPPISLERLDVGTN

SEQ ID NO: 2847 - protein, 10 aa, synthetic construct
  REGION 1..10: note = Synthetic
GPRQAQVSFL

SEQ ID NO: 2848 - protein, 11 aa, synthetic construct
  REGION 1..11: note = Synthetic
GRLVPQVRVID

SEQ ID NO: 2849 - protein, 10 aa, synthetic construct
  REGION 1..10: note = Synthetic
GSAPISMGFR

SEQ ID NO: 2850 - protein, 9 aa, synthetic construct
  REGION 1..9: note = Synthetic
HILAKSTAL

SEQ ID NO: 2851 - protein, 9 aa, synthetic construct
  REGION 1..9: note = Synthetic
HYREVNLVY

SEQ ID NO: 2852 - protein, 9 aa, synthetic construct
  REGION 1..9: note = Synthetic
IPPMKNLAL

SEQ ID NO: 2853 - protein, 12 aa, synthetic construct
  REGION 1..12: note = Synthetic
IPYQGSGKGVSF

SEQ ID NO: 2854 - protein, 9 aa, synthetic construct
  REGION 1..9: note = Synthetic
ISKESQHVY

SEQ ID NO: 2855 - protein, 9 aa, synthetic construct
  REGION 1..9: note = Synthetic
IVSSHFFVY

SEQ ID NO: 2856 - protein, 10 aa, synthetic construct
  REGION 1..10: note = Synthetic
KEIKETGRLF

SEQ ID NO: 2857 - protein, 9 aa, synthetic construct
  REGION 1..9: note = Synthetic
KESQHVYYL

SEQ ID NO: 2858 - protein, 9 aa, synthetic construct
  REGION 1..9: note = Synthetic
KIIDNTEQL

SEQ ID NO: 2859 - protein, 8 aa, synthetic construct
  REGION 1..8: note = Synthetic
KKQINRQN

SEQ ID NO: 2860 - protein, 10 aa, synthetic construct
  REGION 1..10: note = Synthetic
KKVDTNFIYQ

SEQ ID NO: 2861 - protein, 9 aa, synthetic construct
  REGION 1..9: note = Synthetic
KLIDGFFPA

SEQ ID NO: 2862 - protein, 11 aa, synthetic construct
  REGION 1..11: note = Synthetic
KPNLSSKRSEL

SEQ ID NO: 2863 - protein, 9 aa, synthetic construct
  REGION 1..9: note = Synthetic
KVSPYLFTV

SEQ ID NO: 2864 - protein, 10 aa, synthetic construct
  REGION 1..10: note = Synthetic
LETRTTNQFL

SEQ ID NO: 2865 - protein, 8 aa, synthetic construct
  REGION 1..8: note = Synthetic
LLKEATEL

SEQ ID NO: 2866 - protein, 9 aa, synthetic construct
  REGION 1..9: note = Synthetic
LLKKGNSLY

SEQ ID NO: 2867 - protein, 10 aa, synthetic construct
  REGION 1..10: note = Synthetic
LPAPIGGMNY

SEQ ID NO: 2868 - protein, 10 aa, synthetic construct
  REGION 1..10: note = Synthetic
MPEETLHQVM

SEQ ID NO: 2869 - protein, 9 aa, synthetic construct
  REGION 1..9: note = Synthetic
PTTIRGQFS

SEQ ID NO: 2870 - protein, 11 aa, synthetic construct
  REGION 1..11: note = Synthetic
QEISRHQALGY

SEQ ID NO: 2871 - protein, 10 aa, synthetic construct
  REGION 1..10: note = Synthetic
RITHVDTESY

SEQ ID NO: 2872 - protein, 8 aa, synthetic construct
  REGION 1..8: note = Synthetic
RPGLKPDL

SEQ ID NO: 2873 - protein, 8 aa, synthetic construct
  REGION 1..8: note = Synthetic
RPIYGLEV

SEQ ID NO: 2874 - protein, 11 aa, synthetic construct
  REGION 1..11: note = Synthetic
RQAGQEMILAV

SEQ ID NO: 2875 - protein, 9 aa, synthetic construct
  REGION 1..9: note = Synthetic
SAVRIATVY

SEQ ID NO: 2876 - protein, 11 aa, synthetic construct
  REGION 1..11: note = Synthetic
SLMPEETLHQV

SEQ ID NO: 2877 - protein, 9 aa, synthetic construct
  REGION 1..9: note = Synthetic
SMIDLVTKF

SEQ ID NO: 2878 - protein, 13 aa, synthetic construct
  REGION 1..13: note = Synthetic
SMLNSQAIDNLRA

SEQ ID NO: 2879 - protein, 8 aa, synthetic construct
  REGION 1..8: note = Synthetic
SMYRVFEV

SEQ ID NO: 2880 - protein, 9 aa, synthetic construct
  REGION 1..9: note = Synthetic
SQQGMFHAY

SEQ ID NO: 2881 - protein, 14 aa, synthetic construct
  REGION 1..14: note = Synthetic
TDTPIVYNDRNLLD

SEQ ID NO: 2882 - protein, 12 aa, synthetic construct
  REGION 1..12: note = Synthetic
VIINDDQGLFKV

SEQ ID NO: 2883 - protein, 10 aa, synthetic construct
  REGION 1..10: note = Synthetic
YESGVRIASL

SEQ ID NO: 2884 - protein, 8 aa, synthetic construct
  REGION 1..8: note = Synthetic
YLKDKALA

SEQ ID NO: 2885 - protein, 11 aa, synthetic construct
  REGION 1..11: note = Synthetic
YVYDHSGEAVK

SEQ ID NO: 2886 - protein, 15 aa, synthetic construct
  REGION 1..15: note = Synthetic
ARVIDPAAQSFTGVV

SEQ ID NO: 2887 - protein, 15 aa, synthetic construct
  REGION 1..15: note = Synthetic
SDRASARVIDPAAQS

SEQ ID NO: 2888 - protein, 15 aa, synthetic construct
  REGION 1..15: note = Synthetic
VPPGKFVTAALLNTP

SEQ ID NO: 2889 - protein, 15 aa, synthetic construct
  REGION 1..15: note = Synthetic
WVTPVIGSQARKCGL

SEQ ID NO: 2890 - DNA, 20 bp, synthetic construct
  misc_feature 1..20: note = Synthetic
  source 1..20: mol_type = other DNA
ggcccagactgagcacgtga

SEQ ID NO: 2891 - DNA, 20 bp, synthetic construct
  misc_feature 1..20: note = Synthetic
  source 1..20: mol_type = other DNA
ggcccagactgagcacgtga

SEQ ID NO: 2892 - DNA, 20 bp, synthetic construct
  misc_feature 1..20: note = Synthetic
  source 1..20: mol_type = other DNA
ggcccagactgagcacgtga

SEQ ID NO: 2893 - DNA, 20 bp, synthetic construct
  misc_feature 1..20: note = Synthetic
  source 1..20: mol_type = other DNA
ggcccagactgagcacgtga

SEQ ID NO: 2894 - DNA, 20 bp, synthetic construct
  misc_feature 1..20: note = Synthetic
  source 1..20: mol_type = other DNA
ggcccagactgagcacgtga

SEQ ID NO: 2895 - DNA, 20 bp, synthetic construct
  misc_feature 1..20: note = Synthetic
  source 1..20: mol_type = other DNA
ggcccagactgagcacgtga

SEQ ID NO: 2896 - DNA, 20 bp, synthetic construct
  misc_feature 1..20: note = Synthetic
  source 1..20: mol_type = other DNA
ggcccagactgagcacgtga

SEQ ID NO: 2897 - DNA, 20 bp, synthetic construct
  misc_feature 1..20: note = Synthetic
  source 1..20: mol_type = other DNA
ggcccagactgagcacgtga

SEQ ID NO: 2898 - DNA, 20 bp, synthetic construct
  misc_feature 1..20: note = Synthetic
  source 1..20: mol_type = other DNA
ggcccagactgagcacgtga

SEQ ID NO: 2899 - DNA, 20 bp, synthetic construct
  misc_feature 1..20: note = Synthetic
  source 1..20: mol_type = other DNA
ggcccagactgagcacgtga

SEQ ID NO: 2900 - DNA, 20 bp, synthetic construct
  misc_feature 1..20: note = Synthetic
  source 1..20: mol_type = other DNA
gagtccgagcagaagaagaa

SEQ ID NO: 2901 - DNA, 20 bp, synthetic construct
  misc_feature 1..20: note = Synthetic
  source 1..20: mol_type = other DNA
gagtccgagcagaagaagaa

SEQ ID NO: 2902 - DNA, 20 bp, synthetic construct
  misc_feature 1..20: note = Synthetic
  source 1..20: mol_type = other DNA
gagtccgagcagaagaagaa

SEQ ID NO: 2903 - DNA, 20 bp, synthetic construct
  misc_feature 1..20: note = Synthetic
  source 1..20: mol_type = other DNA
gagtccgagcagaagaagaa

SEQ ID NO: 2904 - DNA, 20 bp, synthetic construct
  misc_feature 1..20: note = Synthetic
  source 1..20: mol_type = other DNA
gagtccgagcagaagaagaa

SEQ ID NO: 2905 - DNA, 20 bp, synthetic construct
  misc_feature 1..20: note = Synthetic
  source 1..20: mol_type = other DNA
gagtccgagcagaagaagaa

SEQ ID NO: 2906 - DNA, 20 bp, synthetic construct
  misc_feature 1..20: note = Synthetic
  source 1..20: mol_type = other DNA
gagtccgagcagaagaagaa

SEQ ID NO: 2907 - DNA, 20 bp, synthetic construct
  misc_feature 1..20: note = Synthetic
  source 1..20: mol_type = other DNA
gagtccgagcagaagaagaa

SEQ ID NO: 2908 - DNA, 20 bp, synthetic construct
  misc_feature 1..20: note = Synthetic
  source 1..20: mol_type = other DNA
gagtccgagcagaagaagaa

SEQ ID NO: 2909 - DNA, 20 bp, synthetic construct
  misc_feature 1..20: note = Synthetic
  source 1..20: mol_type = other DNA
ggaatcccttctgcagcacc

SEQ ID NO: 2910 - DNA, 20 bp, synthetic construct
  misc_feature 1..20: note = Synthetic
  source 1..20: mol_type = other DNA
ggaatcccttctgcagcacc

SEQ ID NO: 2911 - DNA, 20 bp, synthetic construct
  misc_feature 1..20: note = Synthetic
  source 1..20: mol_type = other DNA
ggaatcccttctgcagcacc

SEQ ID NO: 2912 - DNA, 20 bp, synthetic construct
  misc_feature 1..20: note = Synthetic
  source 1..20: mol_type = other DNA
ggaatcccttctgcagcacc

SEQ ID NO: 2913 - DNA, 20 bp, synthetic construct
  misc_feature 1..20: note = Synthetic
  source 1..20: mol_type = other DNA
ggaatcccttctgcagcacc

SEQ ID NO: 2914 - DNA, 20 bp, synthetic construct
  misc_feature 1..20: note = Synthetic
  source 1..20: mol_type = other DNA
ggaatcccttctgcagcacc

SEQ ID NO: 2915 - DNA, 20 bp, synthetic construct
  misc_feature 1..20: note = Synthetic
  source 1..20: mol_type = other DNA
ggaatcccttctgcagcacc

SEQ ID NO: 2916 - DNA, 20 bp, synthetic construct
  misc_feature 1..20: note = Synthetic
  source 1..20: mol_type = other DNA
ggaatcccttctgcagcacc

SEQ ID NO: 2917 - DNA, 20 bp, synthetic construct
  misc_feature 1..20: note = Synthetic
  source 1..20: mol_type = other DNA
ggaatcccttctgcagcacc

SEQ ID NO: 2918 - DNA, 20 bp, synthetic construct
  misc_feature 1..20: note = Synthetic
  source 1..20: mol_type = other DNA
ggaatcccttctgcagcacc

SEQ ID NO: 2919 - DNA, 20 bp, synthetic construct
  misc_feature 1..20: note = Synthetic
  source 1..20: mol_type = other DNA
gtcatcttagtcattacctg

SEQ ID NO: 2920 - DNA, 20 bp, synthetic construct
  misc_feature 1..20: note = Synthetic
  source 1..20: mol_type = other DNA
gtcatcttagtcattacctg

SEQ ID NO: 2921 - DNA, 20 bp, synthetic construct
  misc_feature 1..20: note = Synthetic
  source 1..20: mol_type = other DNA
gtcatcttagtcattacctg

SEQ ID NO: 2922 - DNA, 20 bp, synthetic construct
  misc_feature 1..20: note = Synthetic
  source 1..20: mol_type = other DNA
gtcatcttagtcattacctg

SEQ ID NO: 2923 - DNA, 20 bp, synthetic construct
  misc_feature 1..20: note = Synthetic
  source 1..20: mol_type = other DNA
gtcatcttagtcattacctg

SEQ ID NO: 2924 - DNA, 20 bp, synthetic construct
  misc_feature 1..20: note = Synthetic
  source 1..20: mol_type = other DNA
gtcatcttagtcattacctg

SEQ ID NO: 2925 - DNA, 20 bp, synthetic construct
  misc_feature 1..20: note = Synthetic
  source 1..20: mol_type = other DNA
gtcatcttagtcattacctg

SEQ ID NO: 2926 - DNA, 20 bp, synthetic construct
  misc_feature 1..20: note = Synthetic
  source 1..20: mol_type = other DNA
gtcatcttagtcattacctg

SEQ ID NO: 2927 - DNA, 20 bp, synthetic construct
  misc_feature 1..20: note = Synthetic
  source 1..20: mol_type = other DNA
gtcatcttagtcattacctg

SEQ ID NO: 2928 - DNA, 20 bp, synthetic construct
  misc_feature 1..20: note = Synthetic
  source 1..20: mol_type = other DNA
ggcactgcggctggaggtgg

SEQ ID NO: 2929 - DNA, 20 bp, synthetic construct
  misc_feature 1..20: note = Synthetic
  source 1..20: mol_type = other DNA
ggcactgcggctggaggtgg

SEQ ID NO: 2930 - DNA, 20 bp, synthetic construct
  misc_feature 1..20: note = Synthetic
  source 1..20: mol_type = other DNA
ggcactgcggctggaggtgg

SEQ ID NO: 2931 - DNA, 20 bp, synthetic construct
  misc_feature 1..20: note = Synthetic
  source 1..20: mol_type = other DNA
ggcactgcggctggaggtgg

SEQ ID NO: 2932 - DNA, 20 bp, synthetic construct
  misc_feature 1..20: note = Synthetic
  source 1..20: mol_type = other DNA
ggcactgcggctggaggtgg

SEQ ID NO: 2933 - DNA, 20 bp, synthetic construct
  misc_feature 1..20: note = Synthetic
  source 1..20: mol_type = other DNA
ggcactgcggctggaggtgg

SEQ ID NO: 2934 - DNA, 20 bp, synthetic construct
  misc_feature 1..20: note = Synthetic
  source 1..20: mol_type = other DNA
ggcactgcggctggaggtgg

SEQ ID NO: 2935 - DNA, 20 bp, synthetic construct
  misc_feature 1..20: note = Synthetic
  source 1..20: mol_type = other DNA
ggcactgcggctggaggtgg

SEQ ID NO: 2936 - DNA, 20 bp, synthetic construct
  misc_feature 1..20: note = Synthetic
  source 1..20: mol_type = other DNA
ggcactgcggctggaggtgg

SEQ ID NO: 2937 - DNA, 20 bp, synthetic construct
  misc_feature 1..20: note = Synthetic
  source 1..20: mol_type = other DNA
ggcccagactgagcacgtga

SEQ ID NO: 2938 - DNA, 20 bp, synthetic construct
  misc_feature 1..20: note = Synthetic
  source 1..20: mol_type = other DNA
ggcccagactgagcacgtga

SEQ ID NO: 2939 - DNA, 20 bp, synthetic construct
  misc_feature 1..20: note = Synthetic
  source 1..20: mol_type = other DNA
ggcccagactgagcacgtga

SEQ ID NO: 2940 - DNA, 20 bp, synthetic construct
  misc_feature 1..20: note = Synthetic
  source 1..20: mol_type = other DNA
ggcccagactgagcacgtga

SEQ ID NO: 2941 - DNA, 20 bp, synthetic construct
  misc_feature 1..20: note = Synthetic
  source 1..20: mol_type = other DNA
ggcccagactgagcacgtga

SEQ ID NO: 2942 - DNA, 20 bp, synthetic construct
  misc_feature 1..20: note = Synthetic
  source 1..20: mol_type = other DNA
ggcccagactgagcacgtga

SEQ ID NO: 2943 - DNA, 20 bp, synthetic construct
  misc_feature 1..20: note = Synthetic
  source 1..20: mol_type = other DNA
ggcccagactgagcacgtga

SEQ ID NO: 2944 - DNA, 20 bp, synthetic construct
  misc_feature 1..20: note = Synthetic
  source 1..20: mol_type = other DNA
ggcccagactgagcacgtga

SEQ ID NO: 2945 - DNA, 20 bp, synthetic construct
  misc_feature 1..20: note = Synthetic
  source 1..20: mol_type = other DNA
ggcccagactgagcacgtga

SEQ ID NO: 2946 - DNA, 20 bp, synthetic construct
  misc_feature 1..20: note = Synthetic
  source 1..20: mol_type = other DNA
ggcccagactgagcacgtga

SEQ ID NO: 2947 - DNA, 20 bp, synthetic construct
  misc_feature 1..20: note = Synthetic
  source 1..20: mol_type = other DNA
ggcccagactgagcacgtga

SEQ ID NO: 2948 - DNA, 20 bp, synthetic construct
  misc_feature 1..20: note = Synthetic
  source 1..20: mol_type = other DNA
ggcccagactgagcacgtga

SEQ ID NO: 2949 - DNA, 20 bp, synthetic construct
  misc_feature 1..20: note = Synthetic
  source 1..20: mol_type = other DNA
ggcccagactgagcacgtga

SEQ ID NO: 2950 - DNA, 20 bp, synthetic construct
  misc_feature 1..20: note = Synthetic
  source 1..20: mol_type = other DNA
ggcccagactgagcacgtga

SEQ ID NO: 2951 - DNA, 20 bp, synthetic construct
  misc_feature 1..20: note = Synthetic
  source 1..20: mol_type = other DNA
gagtccgagcagaagaagaa

SEQ ID NO: 2952 - DNA, 20 bp, synthetic construct
  misc_feature 1..20: note = Synthetic
  source 1..20: mol_type = other DNA
gagtccgagcagaagaagaa

SEQ ID NO: 2953 - DNA, 20 bp, synthetic construct
  misc_feature 1..20: note = Synthetic
  source 1..20: mol_type = other DNA
gagtccgagcagaagaagaa

SEQ ID NO: 2954 - DNA, 20 bp, synthetic construct
  misc_feature 1..20: note = Synthetic
  source 1..20: mol_type = other DNA
gagtccgagcagaagaagaa

SEQ ID NO: 2955 - DNA, 20 bp, synthetic construct
  misc_feature 1..20: note = Synthetic
  source 1..20: mol_type = other DNA
gagtccgagcagaagaagaa

SEQ ID NO: 2956 - DNA, 20 bp, synthetic construct
  misc_feature 1..20: note = Synthetic
  source 1..20: mol_type = other DNA
gagtccgagcagaagaagaa

SEQ ID NO: 2957 - DNA, 20 bp, synthetic construct
  misc_feature 1..20: note = Synthetic
  source 1..20: mol_type = other DNA
gagtccgagcagaagaagaa

SEQ ID NO: 2958 - DNA, 20 bp, synthetic construct
  misc_feature 1..20: note = Synthetic
  source 1..20: mol_type = other DNA
gagtccgagcagaagaagaa

SEQ ID NO: 2959 - DNA, 20 bp, synthetic construct
  misc_feature 1..20: note = Synthetic
  source 1..20: mol_type = other DNA
gagtccgagcagaagaagaa

SEQ ID NO: 2960 - DNA, 20 bp, synthetic construct
  misc_feature 1..20: note = Synthetic
  source 1..20: mol_type = other DNA
gagtccgagcagaagaagaa

SEQ ID NO: 2961 - DNA, 20 bp, synthetic construct
  misc_feature 1..20: note = Synthetic
  source 1..20: mol_type = other DNA
gagtccgagcagaagaagaa

SEQ ID NO: 2962 - DNA, 20 bp, synthetic construct
  misc_feature 1..20: note = Synthetic
  source 1..20: mol_type = other DNA
ggaatcccttctgcagcacc

SEQ ID NO: 2963 - DNA, 20 bp, synthetic construct
  misc_feature 1..20: note = Synthetic
  source 1..20: mol_type = other DNA
ggaatcccttctgcagcacc

SEQ ID NO: 2964 - DNA, 20 bp, synthetic construct
  misc_feature 1..20: note = Synthetic
  source 1..20: mol_type = other DNA
ggaatcccttctgcagcacc

SEQ ID NO: 2965 - DNA, 20 bp, synthetic construct
  misc_feature 1..20: note = Synthetic
  source 1..20: mol_type = other DNA
ggaatcccttctgcagcacc

SEQ ID NO: 2966 - DNA, 20 bp, synthetic construct
  misc_feature 1..20: note = Synthetic
  source 1..20: mol_type = other DNA
ggaatcccttctgcagcacc

SEQ ID NO: 2967 - DNA, 20 bp, synthetic construct
  misc_feature 1..20: note = Synthetic
  source 1..20: mol_type = other DNA
ggaatcccttctgcagcacc

SEQ ID NO: 2968 - DNA, 20 bp, synthetic construct
  misc_feature 1..20: note = Synthetic
  source 1..20: mol_type = other DNA
ggaatcccttctgcagcacc

SEQ ID NO: 2969 - DNA, 20 bp, synthetic construct
  misc_feature 1..20: note = Synthetic
  source 1..20: mol_type = other DNA
ggaatcccttctgcagcacc

SEQ ID NO: 2970 - DNA, 20 bp, synthetic construct
  misc_feature 1..20: note = Synthetic
  source 1..20: mol_type = other DNA
ggaatcccttctgcagcacc

SEQ ID NO: 2971 - DNA, 20 bp, synthetic construct
  misc_feature 1..20: note = Synthetic
  source 1..20: mol_type = other DNA
ggaatcccttctgcagcacc

SEQ ID NO: 2972 - DNA, 20 bp, synthetic construct
  misc_feature 1..20: note = Synthetic
  source 1..20: mol_type = other DNA
ggaatcccttctgcagcacc

SEQ ID NO: 2973 - DNA, 20 bp, synthetic construct
  misc_feature 1..20: note = Synthetic
  source 1..20: mol_type = other DNA
gtcatcttagtcattacctg

SEQ ID NO: 2974 - DNA, 20 bp, synthetic construct
  misc_feature 1..20: note = Synthetic
  source 1..20: mol_type = other DNA
gtcatcttagtcattacctg

SEQ ID NO: 2975 - DNA, 20 bp, synthetic construct
  misc_feature 1..20: note = Synthetic
  source 1..20: mol_type = other DNA
gtcatcttagtcattacctg

SEQ ID NO: 2976 - DNA, 20 bp, synthetic construct
  misc_feature 1..20: note = Synthetic
  source 1..20: mol_type = other DNA
gtcatcttagtcattacctg

SEQ ID NO: 2977 - DNA, 20 bp, synthetic construct
  misc_feature 1..20: note = Synthetic
  source 1..20: mol_type = other DNA
gtcatcttagtcattacctg

SEQ ID NO: 2978 - DNA, 20 bp, synthetic construct
  misc_feature 1..20: note = Synthetic
  source 1..20: mol_type = other DNA
gtcatcttagtcattacctg

SEQ ID NO: 2979 - DNA, 20 bp, synthetic construct
  misc_feature 1..20: note = Synthetic
  source 1..20: mol_type = other DNA
gtcatcttagtcattacctg

SEQ ID NO: 2980 - DNA, 20 bp, synthetic construct
  misc_feature 1..20: note = Synthetic
  source 1..20: mol_type = other DNA
gtcatcttagtcattacctg

SEQ ID NO: 2981 - DNA, 20 bp, synthetic construct
  misc_feature 1..20: note = Synthetic
  source 1..20: mol_type = other DNA
gtcatcttagtcattacctg

SEQ ID NO: 2982 - DNA, 20 bp, synthetic construct
  misc_feature 1..20: note = Synthetic
  source 1..20: mol_type = other DNA
gtcatcttagtcattacctg

SEQ ID NO: 2983 - DNA, 20 bp, synthetic construct
  misc_feature 1..20: note = Synthetic
  source 1..20: mol_type = other DNA
gtcatcttagtcattacctg

SEQ ID NO: 2984 - DNA, 20 bp, synthetic construct
  misc_feature 1..20: note = Synthetic
  source 1..20: mol_type = other DNA
ggcactgcggctggaggtgg

SEQ ID NO: 2985 - DNA, 20 bp, synthetic construct
  misc_feature 1..20: note = Synthetic
  source 1..20: mol_type = other DNA
ggcactgcggctggaggtgg

SEQ ID NO: 2986 - DNA, 20 bp, synthetic construct
  misc_feature 1..20: note = Synthetic
  source 1..20: mol_type = other DNA
ggcactgcggctggaggtgg

SEQ ID NO: 2987 - DNA, 20 bp, synthetic construct
  misc_feature 1..20: note = Synthetic
  source 1..20: mol_type = other DNA
ggcactgcggctggaggtgg

SEQ ID NO: 2988 - DNA, 20 bp, synthetic construct
  misc_feature 1..20: note = Synthetic
  source 1..20: mol_type = other DNA
ggcactgcggctggaggtgg

SEQ ID NO: 2989 - DNA, 20 bp, synthetic construct
  misc_feature 1..20: note = Synthetic
  source 1..20: mol_type = other DNA
ggcactgcggctggaggtgg

SEQ ID NO: 2990 - DNA, 20 bp, synthetic construct
  misc_feature 1..20: note = Synthetic
  source 1..20: mol_type = other DNA
ggcactgcggctggaggtgg

SEQ ID NO: 2991 - DNA, 20 bp, synthetic construct
  misc_feature 1..20: note = Synthetic
  source 1..20: mol_type = other DNA
ggcactgcggctggaggtgg

SEQ ID NO: 2992 - DNA, 20 bp, synthetic construct
  misc_feature 1..20: note = Synthetic
  source 1..20: mol_type = other DNA
ggcactgcggctggaggtgg

SEQ ID NO: 2993 - DNA, 20 bp, synthetic construct
  misc_feature 1..20: note = Synthetic
  source 1..20: mol_type = other DNA
ggcactgcggctggaggtgg

SEQ ID NO: 2994 - DNA, 20 bp, synthetic construct
  misc_feature 1..20: note = Synthetic
  source 1..20: mol_type = other DNA
ggcactgcggctggaggtgg

SEQ ID NO: 2995 - DNA, 20 bp, synthetic construct
  misc_feature 1..20: note = Synthetic
  source 1..20: mol_type = other DNA
ggcactgcggctggaggtgg

SEQ ID NO: 2996 - DNA, 20 bp, synthetic construct
  misc_feature 1..20: note = Synthetic
  source 1..20: mol_type = other DNA
ggcactgcggctggaggtgg

SEQ ID NO: 2997 - DNA, 18 bp, synthetic construct
  misc_feature 1..18: note = Synthetic
  source 1..18: mol_type = other DNA
tctgccatctcgtgctca

SEQ ID NO: 2998 - DNA, 19 bp, synthetic construct
  misc_feature 1..19: note = Synthetic
  source 1..19: mol_type = other DNA
tctgccatctcgtgctcag

SEQ ID NO: 2999 - DNA, 20 bp, synthetic construct
  misc_feature 1..20: note = Synthetic
  source 1..20: mol_type = other DNA
tctgccatctcgtgctcagt

SEQ ID NO: 3000 - DNA, 21 bp, synthetic construct
  misc_feature 1..21: note = Synthetic
  source 1..21: mol_type = other DNA
tctgccatctcgtgctcagtc

SEQ ID NO: 3001 - DNA, 22 bp, synthetic construct
  misc_feature 1..22: note = Synthetic
  source 1..22: mol_type = other DNA
tctgccatctcgtgctcagtct

SEQ ID NO: 3002 - DNA, 23 bp, synthetic construct
  misc_feature 1..23: note = Synthetic
  source 1..23: mol_type = other DNA
tctgccatctcgtgctcagtctg

SEQ ID NO: 3003 - DNA, 24 bp, synthetic construct
  misc_feature 1..24: note = Synthetic
  source 1..24: mol_type = other DNA
tctgccatctcgtgctcagtctgg

SEQ ID NO: 3004 - DNA, 25 bp, synthetic construct
  misc_feature 1..25: note = Synthetic
  source 1..25: mol_type = other DNA
tctgccatctcgtgctcagtctggg

SEQ ID NO: 3005 - DNA, 26 bp, synthetic construct
  misc_feature 1..26: note = Synthetic
  source 1..26: mol_type = other DNA
tctgccatctcgtgctcagtctgggc

SEQ ID NO: 3006 - DNA, 27 bp, synthetic construct
  misc_feature 1..27: note = Synthetic
  source 1..27: mol_type = other DNA
tctgccatctcgtgctcagtctgggcc

SEQ ID NO: 3007 - DNA, 22 bp, synthetic construct
  misc_feature 1..22: note = Synthetic
  source 1..22: mol_type = other DNA
atgggagcacttcttcttctgc

SEQ ID NO: 3008 - DNA, 23 bp, synthetic construct
  misc_feature 1..23: note = Synthetic
  source 1..23: mol_type = other DNA
atgggagcacttcttcttctgct

SEQ ID NO: 3009 - DNA, 24 bp, synthetic construct
  misc_feature 1..24: note = Synthetic
  source 1..24: mol_type = other DNA
atgggagcacttcttcttctgctc

SEQ ID NO: 3010 - DNA, 25 bp, synthetic construct
  misc_feature 1..25: note = Synthetic
  source 1..25: mol_type = other DNA
atgggagcacttcttcttctgctcg

SEQ ID NO: 3011 - DNA, 26 bp, synthetic construct
  misc_feature 1..26: note = Synthetic
  source 1..26: mol_type = other DNA
atgggagcacttcttcttctgctcgg

SEQ ID NO: 3012 - DNA, 27 bp, synthetic construct
  misc_feature 1..27: note = Synthetic
  source 1..27: mol_type = other DNA
atgggagcacttcttcttctgctcgga

SEQ ID NO: 3013 - DNA, 28 bp, synthetic construct
  misc_feature 1..28: note = Synthetic
  source 1..28: mol_type = other DNA
atgggagcacttcttcttctgctcggac

SEQ ID NO: 3014 - DNA, 29 bp, synthetic construct
  misc_feature 1..29: note = Synthetic
  source 1..29: mol_type = other DNA
atgggagcacttcttcttctgctcggact

SEQ ID NO: 3015 - DNA, 30 bp, synthetic construct
  misc_feature 1..30: note = Synthetic
  source 1..30: mol_type = other DNA
atgggagcacttcttcttctgctcggactc

SEQ ID NO: 3016 - DNA, 25 bp, synthetic construct
  misc_feature 1..25: note = Synthetic
  source 1..25: mol_type = other DNA
ggaaaagcgatcaaggtgctgcaga

SEQ ID NO: 3017 - DNA, 26 bp, synthetic construct
  misc_feature 1..26: note = Synthetic
  source 1..26: mol_type = other DNA
ggaaaagcgatcaaggtgctgcagaa

SEQ ID NO: 3018 - DNA, 27 bp, synthetic construct
  misc_feature 1..27: note = Synthetic
  source 1..27: mol_type = other DNA
ggaaaagcgatcaaggtgctgcagaag

SEQ ID NO: 3019 - DNA, 28 bp, synthetic construct
  misc_feature 1..28: note = Synthetic
  source 1..28: mol_type = other DNA
ggaaaagcgatcaaggtgctgcagaagg

SEQ ID NO: 3020 - DNA, 29 bp, synthetic construct
  misc_feature 1..29: note = Synthetic
  source 1..29: mol_type = other DNA
ggaaaagcgatcaaggtgctgcagaaggg

SEQ ID NO: 3021 - DNA, 30 bp, synthetic construct
  misc_feature 1..30: note = Synthetic
  source 1..30: mol_type = other DNA
ggaaaagcgatcaaggtgctgcagaaggga

SEQ ID NO: 3022 - DNA, 31 bp, synthetic construct
  misc_feature 1..31: note = Synthetic
  source 1..31: mol_type = other DNA
ggaaaagcgatcaaggtgctgcagaagggat

SEQ ID NO: 3023 - DNA, 32 bp, synthetic construct
  misc_feature 1..32: note = Synthetic
  source 1..32: mol_type = other DNA
ggaaaagcgatcaaggtgctgcagaagggatt

SEQ ID NO: 3024 - DNA, 33 bp, synthetic construct
  misc_feature 1..33: note = Synthetic
  source 1..33: mol_type = other DNA
ggaaaagcgatcaaggtgctgcagaagggattc

SEQ ID NO: 3025 - DNA, 34 bp, synthetic construct
  misc_feature 1..34: note = Synthetic
  source 1..34: mol_type = other DNA
ggaaaagcgatcaaggtgctgcagaagggattcc

SEQ ID NO: 3026 - DNA, 20 bp, synthetic construct
  misc_feature 1..20: note = Synthetic
  source 1..20: mol_type = other DNA
gaacacctcatgtaatgact

SEQ ID NO: 3027 - DNA, 21 bp, synthetic construct
  misc_feature 1..21: note = Synthetic
  source 1..21: mol_type = other DNA
gaacacctcatgtaatgacta

SEQ ID NO: 3028 - DNA, 22 bp, synthetic construct
  misc_feature 1..22: note = Synthetic
  source 1..22: mol_type = other DNA
gaacacctcatgtaatgactaa

SEQ ID NO: 3029 - DNA, 23 bp, synthetic construct
  misc_feature 1..23: note = Synthetic
  source 1..23: mol_type = other DNA
gaacacctcatgtaatgactaag

SEQ ID NO: 3030 - DNA, 24 bp, synthetic construct
  misc_feature 1..24: note = Synthetic
  source 1..24: mol_type = other DNA
gaacacctcatgtaatgactaaga

SEQ ID NO: 3031 - DNA, 25 bp, synthetic construct
  misc_feature 1..25: note = Synthetic
  source 1..25: mol_type = other DNA
gaacacctcatgtaatgactaagat

SEQ ID NO: 3032 - DNA, 26 bp, synthetic construct
  misc_feature 1..26: note = Synthetic
  source 1..26: mol_type = other DNA
gaacacctcatgtaatgactaagatg

SEQ ID NO: 3033 - DNA, 27 bp, synthetic construct
  misc_feature 1..27: note = Synthetic
  source 1..27: mol_type = other DNA
gaacacctcatgtaatgactaagatga

SEQ ID NO: 3034 - DNA, 28 bp, synthetic construct
  misc_feature 1..28: note = Synthetic
  source 1..28: mol_type = other DNA
gaacacctcatgtaatgactaagatgac

SEQ ID NO: 3035 - DNA, 20 bp, synthetic construct
  misc_feature 1..20: note = Synthetic
  source 1..20: mol_type = other DNA
gctttaaccccaacctccag

SEQ ID NO: 3036 - DNA, 21 bp, synthetic construct
  misc_feature 1..21: note = Synthetic
  source 1..21: mol_type = other DNA
gctttaaccccaacctccagc

SEQ ID NO: 3037 - DNA, 22 bp, synthetic construct
  misc_feature 1..22: note = Synthetic
  source 1..22: mol_type = other DNA
gctttaaccccaacctccagcc

SEQ ID NO: 3038 - DNA, 23 bp, synthetic construct
  misc_feature 1..23: note = Synthetic
  source 1..23: mol_type = other DNA
gctttaaccccaacctccagccg

SEQ ID NO: 3039 - DNA, 24 bp, synthetic construct
  misc_feature 1..24: note = Synthetic
  source 1..24: mol_type = other DNA
gctttaaccccaacctccagccgc

SEQ ID NO: 3040 - DNA, 25 bp, synthetic construct
  misc_feature 1..25: note = Synthetic
  source 1..25: mol_type = other DNA
gctttaaccccaacctccagccgca

SEQ ID NO: 3041 - DNA, 26 bp, synthetic construct
  misc_feature 1..26: note = Synthetic
  source 1..26: mol_type = other DNA
gctttaaccccaacctccagccgcag

SEQ ID NO: 3042 - DNA, 27 bp, synthetic construct
  misc_feature 1..27: note = Synthetic
  source 1..27: mol_type = other DNA
gctttaaccccaacctccagccgcagt

SEQ ID NO: 3043 - DNA, 28 bp, synthetic construct
  misc_feature 1..28: note = Synthetic
  source 1..28: mol_type = other DNA
gctttaaccccaacctccagccgcagtg

SEQ ID NO: 3044 - DNA, 22 bp, synthetic construct
  misc_feature 1..22: note = Synthetic
  source 1..22: mol_type = other DNA
tctgccatccgtgctcagtctg

SEQ ID NO: 3045 - DNA, 24 bp, synthetic construct
  misc_feature 1..24: note = Synthetic
  source 1..24: mol_type = other DNA
tctgccatcatcgtgctcagtctg

SEQ ID NO: 3046 - DNA, 26 bp, synthetic construct
  misc_feature 1..26: note = Synthetic
  source 1..26: mol_type = other DNA
tctgccatcaaagcgtgctcagtctg

SEQ ID NO: 3047 - DNA, 23 bp, synthetic construct
  misc_feature 1..23: note = Synthetic
  source 1..23: mol_type = other DNA
tctgccatctcgtgctcagtctg

SEQ ID NO: 3048 - DNA, 24 bp, synthetic construct
  misc_feature 1..24: note = Synthetic
  source 1..24: mol_type = other DNA
ctctgccatctcgtgctcagtctg

SEQ ID NO: 3049 - DNA, 25 bp, synthetic construct
  misc_feature 1..25: note = Synthetic
  source 1..25: mol_type = other DNA
cctctgccatctcgtgctcagtctg

SEQ ID NO: 3050 - DNA, 26 bp, synthetic construct
  misc_feature 1..26: note = Synthetic
  source 1..26: mol_type = other DNA
tcctctgccatctcgtgctcagtctg

SEQ ID NO: 3051 - DNA, 27 bp, synthetic construct
  misc_feature 1..27: note = Synthetic
  source 1..27: mol_type = other DNA
ttcctctgccatctcgtgctcagtctg

SEQ ID NO: 3052 - DNA, 28 bp, synthetic construct
  misc_feature 1..28: note = Synthetic
  source 1..28: mol_type = other DNA
tttcctctgccatctcgtgctcagtctg

SEQ ID NO: 3053 - DNA, 29 bp, synthetic construct
  misc_feature 1..29: note = Synthetic
  source 1..29: mol_type = other DNA
ctttcctctgccatctcgtgctcagtctg

SEQ ID NO: 3054 - DNA, 30 bp, synthetic construct
  misc_feature 1..30: note = Synthetic
  source 1..30: mol_type = other DNA
cctttcctctgccatctcgtgctcagtctg

SEQ ID NO: 3055 - DNA, 31 bp, synthetic construct
  misc_feature 1..31: note = Synthetic
  source 1..31: mol_type = other DNA
tcctttcctctgccatctcgtgctcagtctg

SEQ ID NO: 3056 - DNA, 32 bp, synthetic construct
  misc_feature 1..32: note = Synthetic
  source 1..32: mol_type = other DNA
ttcctttcctctgccatctcgtgctcagtctg

SEQ ID NO: 3057 - DNA, 33 bp, synthetic construct
  misc_feature 1..33: note = Synthetic
  source 1..33: mol_type = other DNA
cttcctttcctctgccatctcgtgctcagtctg

SEQ ID NO: 3058 - DNA, 23 bp, synthetic construct
  misc_feature 1..23: note = Synthetic
  source 1..23: mol_type = other DNA
ggagcccttgttcttctgctcgg

SEQ ID NO: 3059 - DNA, 24 bp, synthetic construct
  misc_feature 1..24: note = Synthetic
  source 1..24: mol_type = other DNA
gggagcccttgttcttctgctcgg

SEQ ID NO: 3060 - DNA, 25 bp, synthetic construct
  misc_feature 1..25: note = Synthetic
  source 1..25: mol_type = other DNA
tgggagcccttgttcttctgctcgg

SEQ ID NO: 3061 - DNA, 26 bp, synthetic construct
  misc_feature 1..26: note = Synthetic
  source 1..26: mol_type = other DNA
atgggagcccttgttcttctgctcgg

SEQ ID NO: 3062 - DNA, 27 bp, synthetic construct
  misc_feature 1..27: note = Synthetic
  source 1..27: mol_type = other DNA
gatgggagcccttgttcttctgctcgg

SEQ ID NO: 3063 - DNA, 28 bp, synthetic construct
  misc_feature 1..28: note = Synthetic
  source 1..28: mol_type = other DNA
tgatgggagcccttgttcttctgctcgg

SEQ ID NO: 3064 - DNA, 29 bp, synthetic construct
  misc_feature 1..29: note = Synthetic
  source 1..29: mol_type = other DNA
gtgatgggagcccttgttcttctgctcgg

SEQ ID NO: 3065 - DNA, 30 bp, synthetic construct
  misc_feature 1..30: note = Synthetic
  source 1..30: mol_type = other DNA
tgtgatgggagcccttgttcttctgctcgg

SEQ ID NO: 3066 - DNA, 31 bp, synthetic construct
  misc_feature 1..31: note = Synthetic
  source 1..31: mol_type = other DNA
atgtgatgggagcccttgttcttctgctcgg

SEQ ID NO: 3067 - DNA, 32 bp, synthetic construct
  misc_feature 1..32: note = Synthetic
  source 1..32: mol_type = other DNA
gatgtgatgggagcccttgttcttctgctcgg

SEQ ID NO: 3068 - DNA, 33 bp, synthetic construct
  misc_feature 1..33: note = Synthetic
  source 1..33: mol_type = other DNA
tgatgtgatgggagcccttgttcttctgctcgg

SEQ ID NO: 3069 - DNA, 23 bp, synthetic construct
  misc_feature 1..23: note = Synthetic
  source 1..23: mol_type = other DNA
cgatcaaggtgctgcagaaggga

SEQ ID NO: 3070 - DNA, 24 bp, synthetic construct
  misc_feature 1..24: note = Synthetic
  source 1..24: mol_type = other DNA
gcgatcaaggtgctgcagaaggga

SEQ ID NO: 3071 - DNA, 25 bp, synthetic construct
  misc_feature 1..25: note = Synthetic
  source 1..25: mol_type = other DNA
agcgatcaaggtgctgcagaaggga

SEQ ID NO: 3072 - DNA, 26 bp, synthetic construct
  misc_feature 1..26: note = Synthetic
  source 1..26: mol_type = other DNA
aagcgatcaaggtgctgcagaaggga

SEQ ID NO: 3073 - DNA, 27 bp, synthetic construct
  misc_feature 1..27: note = Synthetic
  source 1..27: mol_type = other DNA
aaagcgatcaaggtgctgcagaaggga

SEQ ID NO: 3074 - DNA, 28 bp, synthetic construct
  misc_feature 1..28: note = Synthetic
  source 1..28: mol_type = other DNA
aaaagcgatcaaggtgctgcagaaggga

SEQ ID NO: 3075 - DNA, 29 bp, synthetic construct
  misc_feature 1..29: note = Synthetic
  source 1..29: mol_type = other DNA
gaaaagcgatcaaggtgctgcagaaggga

SEQ ID NO: 3076 - DNA, 30 bp, synthetic construct; identical to SEQ ID NO: 3021
  misc_feature 1..30: note = Synthetic
  source 1..30: mol_type = other DNA

SEQ ID NO: 3077 - DNA, 31 bp, synthetic construct
  misc_feature 1..31: note = Synthetic
  source 1..31: mol_type = other DNA
cggaaaagcgatcaaggtgctgcagaaggga

SEQ ID NO: 3078 - DNA, 32 bp, synthetic construct
  misc_feature 1..32: note = Synthetic
  source 1..32: mol_type = other DNA
tcggaaaagcgatcaaggtgctgcagaaggga

SEQ ID NO: 3079 - DNA, 33 bp, synthetic construct
  misc_feature 1..33: note = Synthetic
  source 1..33: mol_type = other DNA
ctcggaaaagcgatcaaggtgctgcagaaggga

SEQ ID NO: 3080 - DNA, 25 bp, synthetic construct
  misc_feature 1..25: note = Synthetic
  source 1..25: mol_type = other DNA
aacacctcatgtaatgactaagatg

SEQ ID NO: 3081 - DNA, 26 bp, synthetic construct
  misc_feature 1..26: note = Synthetic
  source 1..26: mol_type = other DNA
gaacacctcatgtaatgactaagatg

SEQ ID NO: 3082 - DNA, 27 bp, synthetic construct
  misc_feature 1..27: note = Synthetic
  source 1..27: mol_type = other DNA
cgaacacctcatgtaatgactaagatg

SEQ ID NO: 3083 - DNA, 28 bp, synthetic construct
  misc_feature 1..28: note = Synthetic
  source 1..28: mol_type = other DNA
acgaacacctcatgtaatgactaagatg

SEQ ID NO: 3084 - DNA, 29 bp, synthetic construct
  misc_feature 1..29: note = Synthetic
  source 1..29: mol_type = other DNA
aacgaacacctcatgtaatgactaagatg

SEQ ID NO: 3085 - DNA, 30 bp, synthetic construct
  misc_feature 1..30: note = Synthetic
  source 1..30: mol_type = other DNA
caacgaacacctcatgtaatgactaagatg

SEQ ID NO: 3086 - DNA, 31 bp, synthetic construct
  misc_feature 1..31: note = Synthetic
  source 1..31: mol_type = other DNA
acaacgaacacctcatgtaatgactaagatg

SEQ ID NO: 3087 - DNA, 32 bp, synthetic construct
  misc_feature 1..32: note = Synthetic
  source 1..32: mol_type = other DNA
tacaacgaacacctcatgtaatgactaagatg

SEQ ID NO: 3088 - DNA, 33 bp, synthetic construct
  misc_feature 1..33: note = Synthetic
  source 1..33: mol_type = other DNA
ttacaacgaacacctcatgtaatgactaagatg

SEQ ID NO: 3089 - DNA, 34 bp, synthetic construct
  misc_feature 1..34: note = Synthetic
  source 1..34: mol_type = other DNA
gttacaacgaacacctcatgtaatgactaagatg

SEQ ID NO: 3090 - DNA, 35 bp, synthetic construct
  misc_feature 1..35: note = Synthetic
  source 1..35: mol_type = other DNA
agttacaacgaacacctcatgtaatgactaagatg

SEQ ID NO: 3091 - DNA, 18 bp, synthetic construct
  misc_feature 1..18: note = Synthetic
  source 1..18: mol_type = other DNA
accccaacctccagccgc

SEQ ID NO: 3092 - DNA, 19 bp, synthetic construct
  misc_feature 1..19: note = Synthetic
  source 1..19: mol_type = other DNA
aaccccaacctccagccgc

SEQ ID NO: 3093 - DNA, 20 bp, synthetic construct
  misc_feature 1..20: note = Synthetic
  source 1..20: mol_type = other DNA
taaccccaacctccagccgc

SEQ ID NO: 3094 - DNA, 21 bp, synthetic construct
  misc_feature 1..21: note = Synthetic
  source 1..21: mol_type = other DNA
ttaaccccaacctccagccgc

SEQ ID NO: 3095 - DNA, 22 bp, synthetic construct
  misc_feature 1..22: note = Synthetic
  source 1..22: mol_type = other DNA
tttaaccccaacctccagccgc

SEQ ID NO: 3096 - DNA, 23 bp, synthetic construct
  misc_feature 1..23: note = Synthetic
  source 1..23: mol_type = other DNA
ctttaaccccaacctccagccgc

SEQ ID NO: 3097 - DNA, 24 bp, synthetic construct
  misc_feature 1..24: note = Synthetic
  source 1..24: mol_type = other DNA
gctttaaccccaacctccagccgc

SEQ ID NO: 3098 - DNA, 25 bp, synthetic construct
  misc_feature 1..25: note = Synthetic
  source 1..25: mol_type = other DNA
cgctttaaccccaacctccagccgc

SEQ ID NO: 3099 - DNA, 26 bp, synthetic construct
  misc_feature 1..26: note = Synthetic
  source 1..26: mol_type = other DNA
ccgctttaaccccaacctccagccgc

SEQ ID NO: 3100 - DNA, 27 bp, synthetic construct
  misc_feature 1..27: note = Synthetic
  source 1..27: mol_type = other DNA
tccgctttaaccccaacctccagccgc

SEQ ID NO: 3101 - DNA, 28 bp, synthetic construct
  misc_feature 1..28: note = Synthetic
  source 1..28: mol_type = other DNA
ctccgctttaaccccaacctccagccgc

SEQ ID NO: 3102 - DNA, 28 bp, synthetic construct
  misc_feature 1..28: note = Synthetic
  source 1..28: mol_type = other DNA
ctccgctttaaccccaacctccagccgc

SEQ ID NO: 3103 - DNA, 28 bp, synthetic construct
  misc_feature 1..28: note = Synthetic
  source 1..28: mol_type = other DNA
ctccgctttaaccccaacctccagccgc

SEQ ID NO: 3104 - DNA, 20 bp, synthetic construct
  misc_feature 1..20: note = Synthetic
  source 1..20: mol_type = other DNA
gtcatcttagtcattacctg

SEQ ID NO: 3105 - DNA, 20 bp, synthetic construct
  misc_feature 1..20: note = Synthetic
  source 1..20: mol_type = other DNA
gagtccgagcagaagaagaa

SEQ ID NO: 3106 - DNA, 20 bp, synthetic construct
  misc_feature 1..20: note = Synthetic
  source 1..20: mol_type = other DNA
ggaatcccttctgcagcacc

SEQ ID NO: 3107 - DNA, 20 bp, synthetic construct
  misc_feature 1..20: note = Synthetic
  source 1..20: mol_type = other DNA
ggcccagactgagcacgtga

SEQ ID NO: 3108 - DNA, 20 bp, synthetic construct
  misc_feature 1..20: note = Synthetic
  source 1..20: mol_type = other DNA
ggcactgcggctggaggtgg

SEQ ID NO: 3109 - DNA, 20 bp, synthetic construct
  misc_feature 1..20: note = Synthetic
  source 1..20: mol_type = other DNA
gtcatcttagtcattacctg

SEQ ID NO: 3110 - DNA, 20 bp, synthetic construct
  misc_feature 1..20: note = Synthetic
  source 1..20: mol_type = other DNA
gtcatcttagtcattacctg

SEQ ID NO: 3111 - DNA, 20 bp, synthetic construct
  misc_feature 1..20: note = Synthetic
  source 1..20: mol_type = other DNA
ggaatcccttctgcagcacc

SEQ ID NO: 3112 - DNA, 20 bp, synthetic construct
  misc_feature 1..20: note = Synthetic
  source 1..20: mol_type = other DNA
ggaatcccttctgcagcacc

SEQ ID NO: 3113 - DNA, 29 bp, synthetic construct
  misc_feature 1..29: note = Synthetic
  source 1..29: mol_type = other DNA
aacgaacacctcatgtaatgactaagatg

SEQ ID NO: 3114 - DNA, 28 bp, synthetic construct
  misc_feature 1..28: note = Synthetic
  source 1..28: mol_type = other DNA
atgggagcacttcttcttctgctcggac

SEQ ID NO: 3115 - DNA, 32 bp, synthetic construct; identical to SEQ ID NO: 3023
  misc_feature 1..32: note = Synthetic
  source 1..32: mol_type = other DNA

SEQ ID NO: 3116 - DNA, 23 bp, synthetic construct
  misc_feature 1..23: note = Synthetic
  source 1..23: mol_type = other DNA
tctgccatgacgtgctcagtctg

SEQ ID NO: 3117 - DNA, 19 bp, synthetic construct
  misc_feature 1..19: note = Synthetic
  source 1..19: mol_type = other DNA
ttaaccccaacctccagcc

SEQ ID NO: 3118 - DNA, 29 bp, synthetic construct
  misc_feature 1..29: note = Synthetic
  source 1..29: mol_type = other DNA
aacgaacaccgcaggtaatgactaagatg

SEQ ID NO: 3119 - DNA, 29 bp, synthetic construct
  misc_feature 1..29: note = Synthetic
  source 1..29: mol_type = other DNA
aacgaacaccccaggtaatgactaagatg

SEQ ID NO: 3120 - DNA, 30 bp, synthetic construct; identical to SEQ ID NO: 3021
  misc_feature 1..30: note = Synthetic
  source 1..30: mol_type = other DNA

SEQ ID NO: 3121 - DNA, 31 bp, synthetic construct
  misc_feature 1..31: note = Synthetic
  source 1..31: mol_type = other DNA
ggaaaagcgagccaggtgctgcagaagggat

SEQ ID NO: 3122 - DNA, 21 bp, synthetic construct
  misc_feature 1..21: note = Synthetic
  source 1..21: mol_type = other DNA
gtcaaccattaagcaaaacat

SEQ ID NO: 3123 - DNA, 21 bp, synthetic construct
  misc_feature 1..21: note = Synthetic
  source 1..21: mol_type = other DNA
gtctcaggctgtgcagacaaa

SEQ ID NO: 3124 - DNA, 20 bp, synthetic construct
  misc_feature 1..20: note = Synthetic
  source 1..20: mol_type = other DNA
ggggcacagatgagaaactc

SEQ ID NO: 3125 - DNA, 20 bp, synthetic construct
  misc_feature 1..20: note = Synthetic
  source 1..20: mol_type = other DNA
gccgtttgtactttgtcctc

SEQ ID NO: 3126 - DNA, 20 bp, synthetic construct
  misc_feature 1..20: note = Synthetic
  source 1..20: mol_type = other DNA
gcgccaccggttgatgtgat

SEQ ID NO: 3127 - DNA, 20 bp, synthetic construct
  misc_feature 1..20: note = Synthetic
  source 1..20: mol_type = other DNA
gcttcgtggcaatgcgccac

SEQ ID NO: 3128 - DNA, 20 bp, synthetic construct
  misc_feature 1..20: note = Synthetic
  source 1..20: mol_type = other DNA
gacatcgatgtcctccccat

SEQ ID NO: 3129 - DNA, 21 bp, synthetic construct
  misc_feature 1..21: note = Synthetic
  source 1..21: mol_type = other DNA
gtggttgcccaccctagtcat

SEQ ID NO: 3130 - DNA, 20 bp, synthetic construct
  misc_feature 1..20: note = Synthetic
  source 1..20: mol_type = other DNA
gcgactctctgcgtactgat

SEQ ID NO: 3131 - DNA, 21 bp, synthetic construct
  misc_feature 1..21: note = Synthetic
  source 1..21: mol_type = other DNA
gccctacttccgctttcacct

SEQ ID NO: 3132 - DNA, 20 bp, synthetic construct
  misc_feature 1..20: note = Synthetic
  source 1..20: mol_type = other DNA
ggattccatgaggtgcgcga

SEQ ID NO: 3133 - DNA, 20 bp, synthetic construct
  misc_feature 1..20: note = Synthetic
  source 1..20: mol_type = other DNA
gctgcagaagggattccatg

SEQ ID NO: 3134 - DNA, 20 bp, synthetic construct
  misc_feature 1..20: note = Synthetic
  source 1..20: mol_type = other DNA
gcttgagaccgccagaagct

SEQ ID NO: 3135 - DNA, 20 bp, synthetic construct
  misc_feature 1..20: note = Synthetic
  source 1..20: mol_type = other DNA
ggggtcccaggtgctgacgt

SEQ ID NO: 3136 - DNA, 20 bp, synthetic construct
  misc_feature 1..20: note = Synthetic
  source 1..20: mol_type = other DNA
gcagaaatagactaattgca

SEQ ID NO: 3137 - DNA, 20 bp, synthetic construct
  misc_feature 1..20: note = Synthetic
  source 1..20: mol_type = other DNA
ggattgacccaggccagggc

SEQ ID NO: 3138 - DNA, 20 bp, synthetic construct
  misc_feature 1..20: note = Synthetic
  source 1..20: mol_type = other DNA
gacgccctctggaggaagca

SEQ ID NO: 3139 - DNA, 19 bp, synthetic construct
  misc_feature 1..19: note = Synthetic
  source 1..19: mol_type = other DNA
gctgtcctgcgacgccctc

SEQ ID NO: 3140 - DNA, 20 bp, synthetic construct
  misc_feature 1..20: note = Synthetic
  source 1..20: mol_type = other DNA
gcacatactagcccctgtct

SEQ ID NO: 3141 - DNA, 20 bp, synthetic construct
  misc_feature 1..20: note = Synthetic
  source 1..20: mol_type = other DNA
gtcaaccagtatcccggtgc

SEQ ID NO: 3142 - DNA, 20 bp, synthetic construct
  misc_feature 1..20: note = Synthetic
  source 1..20: mol_type = other DNA
tcccttccttccacccagcc

SEQ ID NO: 3143 - DNA, 20 bp, synthetic construct
  misc_feature 1..20: note = Synthetic
  source 1..20: mol_type = other DNA
ccctgcctgtcatcctgctt

SEQ ID NO: 3144 - DNA, 20 bp, synthetic construct
  misc_feature 1..20: note = Synthetic
  source 1..20: mol_type = other DNA
gcagtgccaccggggcgccg

SEQ ID NO: 3145 - DNA, 20 bp, synthetic construct
  misc_feature 1..20: note = Synthetic
  source 1..20: mol_type = other DNA
gcgggggctcagagagggca

SEQ ID NO: 3146 - DNA, 21 bp, synthetic construct
  misc_feature 1..21: note = Synthetic
  source 1..21: mol_type = other DNA
gagacacacacacaggcctgg

SEQ ID NO: 3147 - DNA, 21 bp, synthetic construct
  misc_feature 1..21: note = Synthetic
  source 1..21: mol_type = other DNA
gtcaaccattaagcaaaacat

SEQ ID NO: 3148 - DNA, 21 bp, synthetic construct
  misc_feature 1..21: note = Synthetic
  source 1..21: mol_type = other DNA
gtgagttacaacgaacaccgc

SEQ ID NO: 3149 - DNA, 21 bp, synthetic construct
  misc_feature 1..21: note = Synthetic
  source 1..21: mol_type = other DNA
gtgagttacaacgaacacccc

SEQ ID NO: 3150 - DNA, 20 bp, synthetic construct
  misc_feature 1..20: note = Synthetic
  source 1..20: mol_type = other DNA
ggggtcccaggtgctgacgt

SEQ ID NO: 3151 - DNA, 20 bp, synthetic construct
  misc_feature 1..20: note = Synthetic
  source 1..20: mol_type = other DNA
gaagctcggaaaagcgatca

SEQ ID NO: 3152 - DNA, 20 bp, synthetic construct
  misc_feature 1..20: note = Synthetic
  source 1..20: mol_type = other DNA
gaagctcggaaaagcgagcc

SEQ ID NO: 3153 - DNA, 20 bp, synthetic construct
  misc_feature 1..20: note = Synthetic
  source 1..20: mol_type = other DNA
gtcaaccagtatcccggtgc

SEQ ID NO: 3154 - DNA, 20 bp, synthetic construct
  misc_feature 1..20: note = Synthetic
  source 1..20: mol_type = other DNA
ggcccagactgagcacgtga

SEQ ID NO: 3155 - DNA, 20 bp, synthetic construct
  misc_feature 1..20: note = Synthetic
  source 1..20: mol_type = other DNA
ggcccagactgagcacgtga

SEQ ID NO: 3156 - DNA, 20 bp, synthetic construct
  misc_feature 1..20: note = Synthetic
  source 1..20: mol_type = other DNA
ggcccagactgagcacgtga

SEQ ID NO: 3157 - DNA, 20 bp, synthetic construct
  misc_feature 1..20: note = Synthetic
  source 1..20: mol_type = other DNA
ggcccagactgagcacgtga

SEQ ID NO: 3158 - DNA, 20 bp, synthetic construct
  misc_feature 1..20: note = Synthetic
  source 1..20: mol_type = other DNA
ggcccagactgagcacgtga

SEQ ID NO: 3159 - DNA, 20 bp, synthetic construct
  misc_feature 1..20: note = Synthetic
  source 1..20: mol_type = other DNA
ggcccagactgagcacgtga

SEQ ID NO: 3160 - DNA, 20 bp, synthetic construct
  misc_feature 1..20: note = Synthetic
  source 1..20: mol_type = other DNA
ggcccagactgagcacgtga

SEQ ID NO: 3161 - DNA, 20 bp, synthetic construct
  misc_feature 1..20: note = Synthetic
  source 1..20: mol_type = other DNA
ggcccagactgagcacgtga

SEQ ID NO: 3162 - DNA, 20 bp, synthetic construct
  misc_feature 1..20: note = Synthetic
  source 1..20: mol_type = other DNA
ggcccagactgagcacgtga

SEQ ID NO: 3163 - DNA, 20 bp, synthetic construct
  misc_feature 1..20: note = Synthetic
  source 1..20: mol_type = other DNA
ggcccagactgagcacgtga

SEQ ID NO: 3164 - DNA, 20 bp, synthetic construct
  misc_feature 1..20: note = Synthetic
  source 1..20: mol_type = other DNA
ggcccagactgagcacgtga

SEQ ID NO: 3165 - DNA, 20 bp, synthetic construct
  misc_feature 1..20: note = Synthetic
  source 1..20: mol_type = other DNA
ggcccagactgagcacgtga

SEQ ID NO: 3166 - DNA, 20 bp, synthetic construct
  misc_feature 1..20: note = Synthetic
  source 1..20: mol_type = other DNA
ggcccagactgagcacgtga

SEQ ID NO: 3167 - DNA, 20 bp, synthetic construct
  misc_feature 1..20: note = Synthetic
  source 1..20: mol_type = other DNA
ggcccagactgagcacgtga

SEQ ID NO: 3168 - DNA, 20 bp, synthetic construct
  misc_feature 1..20: note = Synthetic
  source 1..20: mol_type = other DNA
ggcccagactgagcacgtga

SEQ ID NO: 3169 - DNA, 20 bp, synthetic construct
  misc_feature 1..20: note = Synthetic
  source 1..20: mol_type = other DNA
ggcccagactgagcacgtga

SEQ ID NO: 3170 - DNA, 20 bp, synthetic construct
  misc_feature 1..20: note = Synthetic
  source 1..20: mol_type = other DNA
ggcccagactgagcacgtga

SEQ ID NO: 3171 - DNA, 20 bp, synthetic construct
  misc_feature 1..20: note = Synthetic
  source 1..20: mol_type = other DNA
ggcccagactgagcacgtga

SEQ ID NO: 3172 - DNA, 20 bp, synthetic construct
  misc_feature 1..20: note = Synthetic
  source 1..20: mol_type = other DNA
ggcccagactgagcacgtga

SEQ ID NO: 3173 - DNA, 20 bp, synthetic construct
  misc_feature 1..20: note = Synthetic
  source 1..20: mol_type = other DNA
ggcccagactgagcacgtga

SEQ ID NO: 3174 - DNA, 20 bp, synthetic construct
  misc_feature 1..20: note = Synthetic
  source 1..20: mol_type = other DNA
ggcccagactgagcacgtga

SEQ ID NO: 3175 - DNA, 20 bp, synthetic construct
  misc_feature 1..20: note = Synthetic
  source 1..20: mol_type = other DNA
ggcccagactgagcacgtga

SEQ ID NO: 3176 - DNA, 20 bp, synthetic construct
  misc_feature 1..20: note = Synthetic
  source 1..20: mol_type = other DNA
ggcccagactgagcacgtga

SEQ ID NO: 3177 - DNA, 20 bp, synthetic construct
  misc_feature 1..20: note = Synthetic
  source 1..20: mol_type = other DNA
ggcccagactgagcacgtga

SEQ ID NO: 3178 - DNA, 20 bp, synthetic construct
  misc_feature 1..20: note = Synthetic
  source 1..20: mol_type = other DNA
ggcccagactgagcacgtga

SEQ ID NO: 3179 - DNA, 20 bp, synthetic construct
  misc_feature 1..20: note = Synthetic
  source 1..20: mol_type = other DNA
ggcccagactgagcacgtga

SEQ ID NO: 3180 - DNA, 20 bp, synthetic construct
  misc_feature 1..20: note = Synthetic
  source 1..20: mol_type = other DNA
ggcccagactgagcacgtga

SEQ ID NO: 3181 - DNA, 20 bp, synthetic construct
  misc_feature 1..20: note = Synthetic
  source 1..20: mol_type = other DNA
ggcccagactgagcacgtga

SEQ ID NO: 3182 - DNA, 20 bp, synthetic construct
  misc_feature 1..20: note = Synthetic
  source 1..20: mol_type = other DNA
ggcccagactgagcacgtga

SEQ ID NO: 3183 - DNA, 20 bp, synthetic construct
  misc_feature 1..20: note = Synthetic
  source 1..20: mol_type = other DNA
ggcccagactgagcacgtga

SEQ ID NO: 3184 - DNA, 20 bp, synthetic construct
  misc_feature 1..20: note = Synthetic
  source 1..20: mol_type = other DNA
ggcccagactgagcacgtga

SEQ ID NO: 3185 - DNA, 20 bp, synthetic construct
  misc_feature 1..20: note = Synthetic
  source 1..20: mol_type = other DNA
ggcccagactgagcacgtga

SEQ ID NO: 3186 - DNA, 20 bp, synthetic construct
  misc_feature 1..20: note = Synthetic
  source 1..20: mol_type = other DNA
ggcccagactgagcacgtga

SEQ ID NO: 3187 - DNA, 20 bp, synthetic construct
  misc_feature 1..20: note = Synthetic
  source 1..20: mol_type = other DNA
ggcccagactgagcacgtga

SEQ ID NO: 3188 - DNA, 20 bp, synthetic construct
  misc_feature 1..20: note = Synthetic
  source 1..20: mol_type = other DNA
gtcatcttagtcattacctg

SEQ ID NO: 3189 - DNA, 20 bp, synthetic construct
  misc_feature 1..20: note = Synthetic
  source 1..20: mol_type = other DNA
gtcatcttagtcattacctg

SEQ ID NO: 3190 - DNA, 20 bp, synthetic construct
  misc_feature 1..20: note = Synthetic
  source 1..20: mol_type = other DNA
gtcatcttagtcattacctg

SEQ ID NO: 3191 - DNA, 20 bp, synthetic construct
  misc_feature 1..20: note = Synthetic
  source 1..20: mol_type = other DNA
gtcatcttagtcattacctg

SEQ ID NO: 3192 - DNA, 20 bp, synthetic construct
  misc_feature 1..20: note = Synthetic
  source 1..20: mol_type = other DNA
gtcatcttagtcattacctg

SEQ ID NO: 3193 - DNA, 20 bp, synthetic construct
  misc_feature 1..20: note = Synthetic
  source 1..20: mol_type = other DNA
gtcatcttagtcattacctg

SEQ ID NO: 3194 - DNA, 20 bp, synthetic construct
  misc_feature 1..20: note = Synthetic
  source 1..20: mol_type = other DNA
gtcatcttagtcattacctg

SEQ ID NO: 3195 - DNA, 20 bp, synthetic construct
  misc_feature 1..20: note = Synthetic
  source 1..20: mol_type = other DNA
gtcatcttagtcattacctg

SEQ ID NO: 3196 - DNA, 20 bp, synthetic construct
  misc_feature 1..20: note = Synthetic
  source 1..20: mol_type = other DNA
gtcatcttagtcattacctg

SEQ ID NO: 3197 - DNA, 20 bp, synthetic construct
  misc_feature 1..20: note = Synthetic
  source 1..20: mol_type = other DNA
gtcatcttagtcattacctg

SEQ ID NO: 3198 - DNA, 20 bp, synthetic construct
  misc_feature 1..20: note = Synthetic
  source 1..20: mol_type = other DNA
gtcatcttagtcattacctg

SEQ ID NO: 3199 - DNA, 20 bp, synthetic construct
  misc_feature 1..20: note = Synthetic
  source 1..20: mol_type = other DNA
gtcatcttagtcattacctg

SEQ ID NO: 3200 - DNA, 20 bp, synthetic construct
  misc_feature 1..20: note = Synthetic
  source 1..20: mol_type = other DNA
ggaatcccttctgcagcacc

SEQ ID NO: 3201 - DNA, 20 bp, synthetic construct
  misc_feature 1..20: note = Synthetic
  source 1..20: mol_type = other DNA
ggaatcccttctgcagcacc

SEQ ID NO: 3202 - DNA, 20 bp, synthetic construct
  misc_feature 1..20: note = Synthetic
  source 1..20: mol_type = other DNA
ggaatcccttctgcagcacc

SEQ ID NO: 3203 - DNA, 20 bp, synthetic construct
  misc_feature 1..20: note = Synthetic
  source 1..20: mol_type = other DNA
ggaatcccttctgcagcacc

SEQ ID NO: 3204 - DNA, 20 bp, synthetic construct
  misc_feature 1..20: note = Synthetic
  source 1..20: mol_type = other DNA
ggaatcccttctgcagcacc

SEQ ID NO: 3205 - DNA, 20 bp, synthetic construct
  misc_feature 1..20: note = Synthetic
  source 1..20: mol_type = other DNA
ggaatcccttctgcagcacc

SEQ ID NO: 3206 - DNA, 20 bp, synthetic construct
  misc_feature 1..20: note = Synthetic
  source 1..20: mol_type = other DNA
ggaatcccttctgcagcacc

SEQ ID NO: 3207 - DNA, 20 bp, synthetic construct
  misc_feature 1..20: note = Synthetic
  source 1..20: mol_type = other DNA
ggaatcccttctgcagcacc

SEQ ID NO: 3208 - DNA, 20 bp, synthetic construct
  misc_feature 1..20: note = Synthetic
  source 1..20: mol_type = other DNA
ggaatcccttctgcagcacc

SEQ ID NO: 3209 - DNA, 20 bp, synthetic construct
  misc_feature 1..20: note = Synthetic
  source 1..20: mol_type = other DNA
ggaatcccttctgcagcacc

SEQ ID NO: 3210 - DNA, 20 bp, synthetic construct
  misc_feature 1..20: note = Synthetic
  source 1..20: mol_type = other DNA
ggaatcccttctgcagcacc

SEQ ID NO: 3211 - DNA, 20 bp, synthetic construct
  misc_feature 1..20: note = Synthetic
  source 1..20: mol_type = other DNA
ggaatcccttctgcagcacc

SEQ ID NO: 3212 - DNA, 20 bp, synthetic construct
  misc_feature 1..20: note = Synthetic
  source 1..20: mol_type = other DNA
gagtccgagcagaagaagaa

SEQ ID NO: 3213 - DNA, 20 bp, synthetic construct
  misc_feature 1..20: note = Synthetic
  source 1..20: mol_type = other DNA
gagtccgagcagaagaagaa

SEQ ID NO: 3214 - DNA, 20 bp, synthetic construct
  misc_feature 1..20: note = Synthetic
  source 1..20: mol_type = other DNA
gagtccgagcagaagaagaa

SEQ ID NO: 3215 - DNA, 20 bp, synthetic construct
  misc_feature 1..20: note = Synthetic
  source 1..20: mol_type = other DNA
gagtccgagcagaagaagaa

SEQ ID NO: 3216 - DNA, 20 bp, synthetic construct
  misc_feature 1..20: note = Synthetic
  source 1..20: mol_type = other DNA
gagtccgagcagaagaagaa

SEQ ID NO: 3217 - DNA, 20 bp, synthetic construct
  misc_feature 1..20: note = Synthetic
  source 1..20: mol_type = other DNA
gagtccgagcagaagaagaa

SEQ ID NO: 3218 - DNA, 20 bp, synthetic construct
  misc_feature 1..20: note = Synthetic
  source 1..20: mol_type = other DNA
gagtccgagcagaagaagaa

SEQ ID NO: 3219 - DNA, 20 bp, synthetic construct
  misc_feature 1..20: note = Synthetic
  source 1..20: mol_type = other DNA
gagtccgagcagaagaagaa

SEQ ID NO: 3220 - DNA, 20 bp, synthetic construct
  misc_feature 1..20: note = Synthetic
  source 1..20: mol_type = other DNA
gagtccgagcagaagaagaa

SEQ ID NO: 3221 - DNA, 20 bp, synthetic construct
  misc_feature 1..20: note = Synthetic
  source 1..20: mol_type = other DNA
gagtccgagcagaagaagaa

SEQ ID NO: 3222 - DNA, 20 bp, synthetic construct
  misc_feature 1..20: note = Synthetic
  source 1..20: mol_type = other DNA
gagtccgagcagaagaagaa

SEQ ID NO: 3223 - DNA, 20 bp, synthetic construct
  misc_feature 1..20: note = Synthetic
  source 1..20: mol_type = other DNA
gagtccgagcagaagaagaa

SEQ ID NO: 3224 - DNA, 20 bp, synthetic construct
  misc_feature 1..20: note = Synthetic
  source 1..20: mol_type = other DNA
gcattttcaggaggaagcga

SEQ ID NO: 3225 - DNA, 20 bp, synthetic construct
  misc_feature 1..20: note = Synthetic
  source 1..20: mol_type = other DNA
gcattttcaggaggaagcga

SEQ ID NO: 3226 - DNA, 20 bp, synthetic construct
  misc_feature 1..20: note = Synthetic
  source 1..20: mol_type = other DNA
gcattttcaggaggaagcga

SEQ ID NO: 3227 - DNA, 20 bp, synthetic construct
  misc_feature 1..20: note = Synthetic
  source 1..20: mol_type = other DNA
gcattttcaggaggaagcga

SEQ ID NO: 3228 - DNA, 20 bp, synthetic construct
  misc_feature 1..20: note = Synthetic
  source 1..20: mol_type = other DNA
gcattttcaggaggaagcga

SEQ ID NO: 3229 - DNA, 20 bp, synthetic construct
  misc_feature 1..20: note = Synthetic
  source 1..20: mol_type = other DNA
gcattttcaggaggaagcga

SEQ ID NO: 3230 - DNA, 20 bp, synthetic construct
  misc_feature 1..20: note = Synthetic
  source 1..20: mol_type = other DNA
gcattttcaggaggaagcga

SEQ ID NO: 3231 - DNA, 20 bp, synthetic construct
  misc_feature 1..20: note = Synthetic
  source 1..20: mol_type = other DNA
gcattttcaggaggaagcga

SEQ ID NO: 3232 - DNA, 20 bp, synthetic construct
  misc_feature 1..20: note = Synthetic
  source 1..20: mol_type = other DNA
gcattttcaggaggaagcga

SEQ ID NO: 3233 - DNA, 20 bp, synthetic construct
  misc_feature 1..20: note = Synthetic
  source 1..20: mol_type = other DNA
gcattttcaggaggaagcga

SEQ ID NO: 3234 - DNA, 20 bp, synthetic construct
  misc_feature 1..20: note = Synthetic
  source 1..20: mol_type = other DNA
gcattttcaggaggaagcga

SEQ ID NO: 3235 - DNA, 20 bp, synthetic construct
  misc_feature 1..20: note = Synthetic
  source 1..20: mol_type = other DNA
gcattttcaggaggaagcga

SEQ ID NO: 3236 - DNA, 20 bp, synthetic construct
  misc_feature 1..20: note = Synthetic
  source 1..20: mol_type = other DNA
gatgtctgcaggccagatga

SEQ ID NO: 3237 - DNA, 20 bp, synthetic construct
  misc_feature 1..20: note = Synthetic
  source 1..20: mol_type = other DNA
gatgtctgcaggccagatga

SEQ ID NO: 3238 - DNA, 20 bp, synthetic construct
  misc_feature 1..20: note = Synthetic
  source 1..20: mol_type = other DNA
gatgtctgcaggccagatga

SEQ ID NO: 3239 - DNA, 20 bp, synthetic construct
  misc_feature 1..20: note = Synthetic
  source 1..20: mol_type = other DNA
gatgtctgcaggccagatga

SEQ ID NO: 3240 - DNA, 20 bp, synthetic construct
  misc_feature 1..20: note = Synthetic
  source 1..20: mol_type = other DNA
gatgtctgcaggccagatga

SEQ ID NO: 3241 - DNA, 20 bp, synthetic construct
  misc_feature 1..20: note = Synthetic
  source 1..20: mol_type = other DNA
gatgtctgcaggccagatga

SEQ ID NO: 3242 - DNA, 20 bp, synthetic construct
  misc_feature 1..20: note = Synthetic
  source 1..20: mol_type = other DNA
gatgtctgcaggccagatga

SEQ ID NO: 3243 - DNA, 20 bp, synthetic construct
  misc_feature 1..20: note = Synthetic
  source 1..20: mol_type = other DNA
gatgtctgcaggccagatga

SEQ ID NO: 3244 - DNA, 20 bp, synthetic construct
  misc_feature 1..20: note = Synthetic
  source 1..20: mol_type = other DNA
gatgtctgcaggccagatga

SEQ ID NO: 3245 - DNA, 20 bp, synthetic construct
  misc_feature 1..20: note = Synthetic
  source 1..20: mol_type = other DNA
gatgtctgcaggccagatga

SEQ ID NO: 3246 - DNA, 20 bp, synthetic construct
  misc_feature 1..20: note = Synthetic
  source 1..20: mol_type = other DNA
gatgtctgcaggccagatga

SEQ ID NO: 3247 - DNA, 20 bp, synthetic construct
  misc_feature 1..20: note = Synthetic
  source 1..20: mol_type = other DNA
gatgtctgcaggccagatga

SEQ ID NO: 3248 - DNA, 20 bp, synthetic construct
  misc_feature 1..20: note = Synthetic
  source 1..20: mol_type = other DNA
gattcctggtgccagaaaca

SEQ ID NO: 3249 - DNA, 20 bp, synthetic construct
  misc_feature 1..20: note = Synthetic
  source 1..20: mol_type = other DNA
gattcctggtgccagaaaca

SEQ ID NO: 3250 - DNA, 20 bp, synthetic construct
  misc_feature 1..20: note = Synthetic
  source 1..20: mol_type = other DNA
gattcctggtgccagaaaca

SEQ ID NO: 3251 - DNA, 20 bp, synthetic construct
  misc_feature 1..20: note = Synthetic
  source 1..20: mol_type = other DNA
gattcctggtgccagaaaca

SEQ ID NO: 3252 - DNA, 20 bp, synthetic construct
  misc_feature 1..20: note = Synthetic
  source 1..20: mol_type = other DNA
gattcctggtgccagaaaca

SEQ ID NO: 3253 - DNA, 20 bp, synthetic construct
  misc_feature 1..20: note = Synthetic
  source 1..20: mol_type = other DNA
gattcctggtgccagaaaca

SEQ ID NO: 3254 - DNA, 20 bp, synthetic construct
  misc_feature 1..20: note = Synthetic
  source 1..20: mol_type = other DNA
gattcctggtgccagaaaca

SEQ ID NO: 3255 - DNA, 20 bp, synthetic construct
  misc_feature 1..20: note = Synthetic
  source 1..20: mol_type = other DNA
gattcctggtgccagaaaca

SEQ ID NO: 3256 - DNA, 20 bp, synthetic construct
  misc_feature 1..20: note = Synthetic
  source 1..20: mol_type = other DNA
gattcctggtgccagaaaca

SEQ ID NO: 3257 - DNA, 20 bp, synthetic construct
  misc_feature 1..20: note = Synthetic
  source 1..20: mol_type = other DNA
gattcctggtgccagaaaca

SEQ ID NO: 3258 - DNA, 20 bp, synthetic construct
  misc_feature 1..20: note = Synthetic
  source 1..20: mol_type = other DNA
gattcctggtgccagaaaca

SEQ ID NO: 3259 - DNA, 20 bp, synthetic construct
  misc_feature 1..20: note = Synthetic
  source 1..20: mol_type = other DNA
gattcctggtgccagaaaca

SEQ ID NO: 3260 - DNA, 20 bp, synthetic construct
  misc_feature 1..20: note = Synthetic
  source 1..20: mol_type = other DNA
ggcccagactgagcacgtga

SEQ ID NO: 3261 - DNA, 20 bp, synthetic construct
  misc_feature 1..20: note = Synthetic
  source 1..20: mol_type = other DNA
ggcccagactgagcacgtga

SEQ ID NO: 3262 - DNA, 20 bp, synthetic construct
  misc_feature 1..20: note = Synthetic
  source 1..20: mol_type = other DNA
ggcccagactgagcacgtga

SEQ ID NO: 3263 - DNA, 20 bp, synthetic construct
  misc_feature 1..20: note = Synthetic
  source 1..20: mol_type = other DNA
ggcccagactgagcacgtga

SEQ ID NO: 3264 - DNA, 20 bp, synthetic construct
  misc_feature 1..20: note = Synthetic
  source 1..20: mol_type = other DNA
ggcccagactgagcacgtga

SEQ ID NO: 3265 - DNA, 20 bp, synthetic construct
  misc_feature 1..20: note = Synthetic
  source 1..20: mol_type = other DNA
ggcccagactgagcacgtga

SEQ ID NO: 3266 - DNA, 20 bp, synthetic construct
  misc_feature 1..20: note = Synthetic
  source 1..20: mol_type = other DNA
ggcccagactgagcacgtga

SEQ ID NO: 3267 - DNA, 20 bp, synthetic construct
  misc_feature 1..20: note = Synthetic
  source 1..20: mol_type = other DNA
ggcccagactgagcacgtga

SEQ ID NO: 3268 - DNA, 20 bp, synthetic construct
  misc_feature 1..20: note = Synthetic
  source 1..20: mol_type = other DNA
ggcccagactgagcacgtga

SEQ ID NO: 3269 - DNA, 20 bp, synthetic construct
  misc_feature 1..20: note = Synthetic
  source 1..20: mol_type = other DNA
ggcccagactgagcacgtga

SEQ ID NO: 3270 - DNA, 20 bp, synthetic construct
  misc_feature 1..20: note = Synthetic
  source 1..20: mol_type = other DNA
gtcatcttagtcattacctg

SEQ ID NO: 3271 - DNA, 20 bp, synthetic construct
  misc_feature 1..20: note = Synthetic
  source 1..20: mol_type = other DNA
gtcatcttagtcattacctg

SEQ ID NO: 3272 - DNA, 20 bp, synthetic construct
  misc_feature 1..20: note = Synthetic
  source 1..20: mol_type = other DNA
gtcatcttagtcattacctg

SEQ ID NO: 3273 - DNA, 20 bp, synthetic construct
  misc_feature 1..20: note = Synthetic
  source 1..20: mol_type = other DNA
gtcatcttagtcattacctg

SEQ ID NO: 3274 - DNA, 20 bp, synthetic construct
  misc_feature 1..20: note = Synthetic
  source 1..20: mol_type = other DNA
ggaatcccttctgcagcacc

SEQ ID NO: 3275 - DNA, 20 bp, synthetic construct
  misc_feature 1..20: note = Synthetic
  source 1..20: mol_type = other DNA
ggaatcccttctgcagcacc

SEQ ID NO: 3276 - DNA, 20 bp, synthetic construct
  misc_feature 1..20: note = Synthetic
  source 1..20: mol_type = other DNA
ggaatcccttctgcagcacc

SEQ ID NO: 3277 - DNA, 20 bp, synthetic construct
  misc_feature 1..20: note = Synthetic
  source 1..20: mol_type = other DNA
ggaatcccttctgcagcacc

SEQ ID NO: 3278 - DNA, 20 bp, synthetic construct
  misc_feature 1..20: note = Synthetic
  source 1..20: mol_type = other DNA
gagtccgagcagaagaagaa

SEQ ID NO: 3279 - DNA, 20 bp, synthetic construct
  misc_feature 1..20: note = Synthetic
  source 1..20: mol_type = other DNA
gagtccgagcagaagaagaa

SEQ ID NO: 3280 - DNA, 20 bp, synthetic construct
  misc_feature 1..20: note = Synthetic
  source 1..20: mol_type = other DNA
gagtccgagcagaagaagaa

SEQ ID NO: 3281 - DNA, 20 bp, synthetic construct
  misc_feature 1..20: note = Synthetic
  source 1..20: mol_type = other DNA
gagtccgagcagaagaagaa

SEQ ID NO: 3282 - DNA, 20 bp, synthetic construct
  misc_feature 1..20: note = Synthetic
  source 1..20: mol_type = other DNA
gcattttcaggaggaagcga

SEQ ID NO: 3283 - DNA, 20 bp, synthetic construct
  misc_feature 1..20: note = Synthetic
  source 1..20: mol_type = other DNA
gcattttcaggaggaagcga

SEQ ID NO: 3284 - DNA, 20 bp, synthetic construct
  misc_feature 1..20: note = Synthetic
  source 1..20: mol_type = other DNA
gcattttcaggaggaagcga

SEQ ID NO: 3285 - DNA, 20 bp, synthetic construct
  misc_feature 1..20: note = Synthetic
  source 1..20: mol_type = other DNA
gcattttcaggaggaagcga

SEQ ID NO: 3286 - DNA, 20 bp, synthetic construct
  misc_feature 1..20: note = Synthetic
  source 1..20: mol_type = other DNA
gatgtctgcaggccagatga

SEQ ID NO: 3287 - DNA, 20 bp, synthetic construct
  misc_feature 1..20: note = Synthetic
  source 1..20: mol_type = other DNA
gatgtctgcaggccagatga

SEQ ID NO: 3288 - DNA, 20 bp, synthetic construct
  misc_feature 1..20: note = Synthetic
  source 1..20: mol_type = other DNA
gatgtctgcaggccagatga

SEQ ID NO: 3289 - DNA, 20 bp, synthetic construct
  misc_feature 1..20: note = Synthetic
  source 1..20: mol_type = other DNA
gatgtctgcaggccagatga

SEQ ID NO: 3290 - DNA, 20 bp, synthetic construct
  misc_feature 1..20: note = Synthetic
  source 1..20: mol_type = other DNA
gattcctggtgccagaaaca

SEQ ID NO: 3291 - DNA, 20 bp, synthetic construct
  misc_feature 1..20: note = Synthetic
  source 1..20: mol_type = other DNA
gattcctggtgccagaaaca

SEQ ID NO: 3292 - DNA, 20 bp, synthetic construct
  misc_feature 1..20: note = Synthetic
  source 1..20: mol_type = other DNA
gattcctggtgccagaaaca

SEQ ID NO: 3293 - DNA, 20 bp, synthetic construct
  misc_feature 1..20: note = Synthetic
  source 1..20: mol_type = other DNA
gattcctggtgccagaaaca

SEQ ID NO: 3294 - DNA, 20 bp, synthetic construct
  misc_feature 1..20: note = Synthetic
  source 1..20: mol_type = other DNA
ggcccagactgagcacgtga

SEQ ID NO: 3295 - DNA, 20 bp, synthetic construct
  misc_feature 1..20: note = Synthetic
  source 1..20: mol_type = other DNA
ggcccagactgagcacgtga

SEQ ID NO: 3296 - DNA, 20 bp, synthetic construct
  misc_feature 1..20: note = Synthetic
  source 1..20: mol_type = other DNA
ggcccagactgagcacgtga

SEQ ID NO: 3297 - DNA, 20 bp, synthetic construct
  misc_feature 1..20: note = Synthetic
  source 1..20: mol_type = other DNA
ggcccagactgagcacgtga

SEQ ID NO: 3298 - DNA, 20 bp, synthetic construct
  misc_feature 1..20: note = Synthetic
  source 1..20: mol_type = other DNA
gtcatcttagtcattacctg

SEQ ID NO: 3299 - DNA, 20 bp, synthetic construct
  misc_feature 1..20: note = Synthetic
  source 1..20: mol_type = other DNA
gtcatcttagtcattacctg

SEQ ID NO: 3300 - DNA, 20 bp, synthetic construct
  misc_feature 1..20: note = Synthetic
  source 1..20: mol_type = other DNA
gtcatcttagtcattacctg

SEQ ID NO: 3301 - DNA, 20 bp, synthetic construct
  misc_feature 1..20: note = Synthetic
  source 1..20: mol_type = other DNA
gtcatcttagtcattacctg

SEQ ID NO: 3302 - DNA, 20 bp, synthetic construct
  misc_feature 1..20: note = Synthetic
  source 1..20: mol_type = other DNA
ggaatcccttctgcagcacc

SEQ ID NO: 3303 - DNA, 20 bp, synthetic construct
  misc_feature 1..20: note = Synthetic
  source 1..20: mol_type = other DNA
ggaatcccttctgcagcacc

SEQ ID NO: 3304 - DNA, 20 bp, synthetic construct
  misc_feature 1..20: note = Synthetic
  source 1..20: mol_type = other DNA
ggaatcccttctgcagcacc

SEQ ID NO: 3305 - DNA, 23 bp, synthetic construct
  misc_feature 1..23: note = Synthetic
  source 1..23: mol_type = other DNA
tctgccatctcgtgctcagtctg

SEQ ID NO: 3306 - DNA, 23 bp, synthetic construct
  misc_feature 1..23: note = Synthetic
  source 1..23: mol_type = other DNA
tctgccatcgcgtgctcagtctg

SEQ ID NO: 3307 - DNA, 23 bp, synthetic construct
  misc_feature 1..23: note = Synthetic
  source 1..23: mol_type = other DNA
tctgccatcccgtgctcagtctg

SEQ ID NO: 3308 - DNA, 23 bp, synthetic construct
  misc_feature 1..23: note = Synthetic
  source 1..23: mol_type = other DNA
tctgccattacgtgctcagtctg

SEQ ID NO: 3309 - DNA, 23 bp, synthetic construct
  misc_feature 1..23: note = Synthetic
  source 1..23: mol_type = other DNA
tctgccatgacgtgctcagtctg

SEQ ID NO: 3310 - DNA, 23 bp, synthetic construct
  misc_feature 1..23: note = Synthetic
  source 1..23: mol_type = other DNA
tctgccataacgtgctcagtctg

SEQ ID NO: 3311 - DNA, 23 bp, synthetic construct
  misc_feature 1..23: note = Synthetic
  source 1..23: mol_type = other DNA
tctgccagcacgtgctcagtctg

SEQ ID NO: 3312 - DNA, 23 bp, synthetic construct
  misc_feature 1..23: note = Synthetic
  source 1..23: mol_type = other DNA
tctgccaccacgtgctcagtctg

SEQ ID NO: 3313 - DNA, 23 bp, synthetic construct
  misc_feature 1..23: note = Synthetic
  source 1..23: mol_type = other DNA
tctgccaacacgtgctcagtctg

SEQ ID NO: 3314 - DNA, 23 bp, synthetic construct
  misc_feature 1..23: note = Synthetic
  source 1..23: mol_type = other DNA
tctgccttcacgtgctcagtctg

SEQ ID NO: 3315 - DNA, 23 bp, synthetic construct
  misc_feature 1..23: note = Synthetic
  source 1..23: mol_type = other DNA
tctgccgtcacgtgctcagtctg

SEQ ID NO: 3316 - DNA, 23 bp, synthetic construct
  misc_feature 1..23: note = Synthetic
  source 1..23: mol_type = other DNA
tctgccctcacgtgctcagtctg

SEQ ID NO: 3317 - DNA, 23 bp, synthetic construct
  misc_feature 1..23: note = Synthetic
  source 1..23: mol_type = other DNA
tctgctatcacgtgctcagtctg

SEQ ID NO: 3318 - DNA, 23 bp, synthetic construct
  misc_feature 1..23: note = Synthetic
  source 1..23: mol_type = other DNA
tctgcgatcacgtgctcagtctg

SEQ ID NO: 3319 - DNA, 23 bp, synthetic construct
  misc_feature 1..23: note = Synthetic
  source 1..23: mol_type = other DNA
tctgcaatcacgtgctcagtctg

SEQ ID NO: 3320 - DNA, 23 bp, synthetic construct
  misc_feature 1..23: note = Synthetic
  source 1..23: mol_type = other DNA
tctgtcatcacgtgctcagtctg

SEQ ID NO: 3321 - DNA, 23 bp, synthetic construct
  misc_feature 1..23: note = Synthetic
  source 1..23: mol_type = other DNA
tctggcatcacgtgctcagtctg

SEQ ID NO: 3322 - DNA, 23 bp, synthetic construct
  misc_feature 1..23: note = Synthetic
  source 1..23: mol_type = other DNA
tctgacatcacgtgctcagtctg

SEQ ID NO: 3323 - DNA, 23 bp, synthetic construct
  misc_feature 1..23: note = Synthetic
  source 1..23: mol_type = other DNA
tcttccatcacgtgctcagtctg

SEQ ID NO: 3324 - DNA, 23 bp, synthetic construct
  misc_feature 1..23: note = Synthetic
  source 1..23: mol_type = other DNA
tctcccatcacgtgctcagtctg

SEQ ID NO: 3325 - DNA, 23 bp, synthetic construct
  misc_feature 1..23: note = Synthetic
  source 1..23: mol_type = other DNA
tctaccatcacgtgctcagtctg

SEQ ID NO: 3326 - DNA, 23 bp, synthetic construct
  misc_feature 1..23: note = Synthetic
  source 1..23: mol_type = other DNA
tcggccatcacgtgctcagtctg

SEQ ID NO: 3327 - DNA, 23 bp, synthetic construct
  misc_feature 1..23: note = Synthetic
  source 1..23: mol_type = other DNA
tccgccatcacgtgctcagtctg

SEQ ID NO: 3328 - DNA, 23 bp, synthetic construct
  misc_feature 1..23: note = Synthetic
  source 1..23: mol_type = other DNA
tcagccatcacgtgctcagtctg

SEQ ID NO: 3329 - DNA, 47 bp, synthetic construct
  misc_feature 1..47: note = Synthetic
  source 1..47: mol_type = other DNA
tggaggaagcagggcttcctttcctctgccatctcgtgctcagtctg

SEQ ID NO: 3330 - DNA, 47 bp, synthetic construct
  misc_feature 1..47: note = Synthetic
  source 1..47: mol_type = other DNA
tggaggaagcagggcttcctttgctctgccatcacgtgctcagtctg

SEQ ID NO: 3331 - DNA, 47 bp, synthetic construct
  misc_feature 1..47: note = Synthetic
  source 1..47: mol_type = other DNA
tggaggaagcagggcttcctatcctctgccatcacgtgctcagtctg

SEQ ID NO: 3332 - DNA, 47 bp, synthetic construct
  misc_feature 1..47: note = Synthetic
  source 1..47: mol_type = other DNA
tggaggaagcagggcttgctttcctctgccatcacgtgctcagtctg

SEQ ID NO: 3333 - DNA, 47 bp, synthetic construct
  misc_feature 1..47: note = Synthetic
  source 1..47: mol_type = other DNA
tggaggaagcaggggttcctttcctctgccatcacgtgctcagtctg

SEQ ID NO: 3334 - DNA, 47 bp, synthetic construct
  misc_feature 1..47: note = Synthetic
  source 1..47: mol_type = other DNA
tggaggaagcacggcttcctttcctctgccatcacgtgctcagtctg

SEQ ID NO: 3335 - DNA, 47 bp, synthetic construct
  misc_feature 1..47: note = Synthetic
  source 1..47: mol_type = other DNA
tggaggaagctgggcttcctttcctctgccatcacgtgctcagtctg

SEQ ID NO: 3336 - DNA, 47 bp, synthetic construct
  misc_feature 1..47: note = Synthetic
  source 1..47: mol_type = other DNA
tggaggaaccagggcttcctttcctctgccatcacgtgctcagtctg

SEQ ID NO: 3337 - DNA, 47 bp, synthetic construct
  misc_feature 1..47: note = Synthetic
  source 1..47: mol_type = other DNA
tggacgaagcagggcttcctttcctctgccatcacgtgctcagtctg

SEQ ID NO: 3338 - DNA, 47 bp, synthetic construct
  misc_feature 1..47: note = Synthetic
  source 1..47: mol_type = other DNA
tcgaggaagcagggcttcctttcctctgccatcacgtgctcagtctg

SEQ ID NO: 3339 - DNA, 29 bp, synthetic construct
  misc_feature 1..29: note = Synthetic
  source 1..29: mol_type = other DNA
aacgaacacctcatgtaatgactaagatg

SEQ ID NO: 3340 - DNA, 29 bp, synthetic construct
  misc_feature 1..29: note = Synthetic
  source 1..29: mol_type = other DNA
aacgaacacctcacgtaatgactaagatg

SEQ ID NO: 3341 - DNA, 29 bp, synthetic construct
  misc_feature 1..29: note = Synthetic
  source 1..29: mol_type = other DNA
aacgaacacctcaagtaatgactaagatg

SEQ ID NO: 3342 - DNA, 29 bp, synthetic construct
  misc_feature 1..29: note = Synthetic
  source 1..29: mol_type = other DNA
aacgaacacctctggtaatgactaagatg

SEQ ID NO: 3343 - DNA, 29 bp, synthetic construct
  misc_feature 1..29: note = Synthetic
  source 1..29: mol_type = other DNA
aacgaacacctccggtaatgactaagatg

SEQ ID NO: 3344 - DNA, 29 bp, synthetic construct
  misc_feature 1..29: note = Synthetic
  source 1..29: mol_type = other DNA
aacgaacacctgaggtaatgactaagatg

SEQ ID NO: 3345 - DNA, 29 bp, synthetic construct
  misc_feature 1..29: note = Synthetic
  source 1..29: mol_type = other DNA
aacgaacaccgcaggtaatgactaagatg

SEQ ID NO: 3346 - DNA, 29 bp, synthetic construct
  misc_feature 1..29: note = Synthetic
  source 1..29: mol_type = other DNA
aacgaacaccacaggtaatgactaagatg

SEQ ID NO: 3347 - DNA, 29 bp, synthetic construct
  misc_feature 1..29: note = Synthetic
  source 1..29: mol_type = other DNA
aacgaacaccccaggtaatgactaagatg

SEQ ID NO: 3348 - DNA, 29 bp, synthetic construct
  misc_feature 1..29: note = Synthetic
  source 1..29: mol_type = other DNA
aacgaacacatcaggtaatgactaagatg

SEQ ID NO: 3349 - DNA, 29 bp, synthetic construct
  misc_feature 1..29: note = Synthetic
  source 1..29: mol_type = other DNA
aacgaacatctcaggtaatgactaagatg

SEQ ID NO: 3350 - DNA, 29 bp, synthetic construct
  misc_feature 1..29: note = Synthetic
  source 1..29: mol_type = other DNA
aacgaacgcctcaggtaatgactaagatg

SEQ ID NO: 3351 - DNA, 31 bp, synthetic construct; identical to SEQ ID NO: 691
  misc_feature 1..31: note = Synthetic
  source 1..31: mol_type = other DNA

SEQ ID NO: 3352 - DNA, 31 bp, synthetic construct
  misc_feature 1..31: note = Synthetic
  source 1..31: mol_type = other DNA
ggaaaagcgatccaggagctgcagaagggat

SEQ ID NO: 3353 - DNA, 31 bp, synthetic construct
  misc_feature 1..31: note = Synthetic
  source 1..31: mol_type = other DNA
ggaaaagcgatccagttgctgcagaagggat

SEQ ID NO: 3354 - DNA, 31 bp, synthetic construct
  misc_feature 1..31: note = Synthetic
  source 1..31: mol_type = other DNA
ggaaaagcgatccacgtgctgcagaagggat

SEQ ID NO: 3355 - DNA, 31 bp, synthetic construct
  misc_feature 1..31: note = Synthetic
  source 1..31: mol_type = other DNA
ggaaaagcgatccaagtgctgcagaagggat

SEQ ID NO: 3356 - DNA, 31 bp, synthetic construct
  misc_feature 1..31: note = Synthetic
  source 1..31: mol_type = other DNA
ggaaaagcgatcctggtgctgcagaagggat

SEQ ID NO: 3357 - DNA, 31 bp, synthetic construct
  misc_feature 1..31: note = Synthetic
  source 1..31: mol_type = other DNA
ggaaaagcgatcccggtgctgcagaagggat

SEQ ID NO: 3358 - DNA, 31 bp, synthetic construct
  misc_feature 1..31: note = Synthetic
  source 1..31: mol_type = other DNA
ggaaaagcgatctaggtgctgcagaagggat

SEQ ID NO: 3359 - DNA, 31 bp, synthetic construct; identical to SEQ ID NO: 690
  misc_feature 1..31: note = Synthetic
  source 1..31: mol_type = other DNA

SEQ ID NO: 3360 - DNA, 31 bp, synthetic construct; identical to SEQ ID NO: 3121
  misc_feature 1..31: note = Synthetic
  source 1..31: mol_type = other DNA

SEQ ID NO: 3361 - DNA, 31 bp, synthetic construct
  misc_feature 1..31: note = Synthetic
  source 1..31: mol_type = other DNA
ggaaaagcggtccaggtgctgcagaagggat

SEQ ID NO: 3362 - DNA, 31 bp, synthetic construct
  misc_feature 1..31: note = Synthetic
  source 1..31: mol_type = other DNA
ggaaaagagatccaggtgctgcagaagggat

SEQ ID NO: 3363 - DNA, 30 bp, synthetic construct; identical to SEQ ID NO: 687
  misc_feature 1..30: note = Synthetic
  source 1..30: mol_type = other DNA

SEQ ID NO: 3364 - DNA, 30 bp, synthetic construct
  misc_feature 1..30: note = Synthetic
  source 1..30: mol_type = other DNA
gtgatgggagccctacttcttctgctcgga

SEQ ID NO: 3365 - DNA, 30 bp, synthetic construct
  misc_feature 1..30: note = Synthetic
  source 1..30: mol_type = other DNA
gtgatgggagcccctcttcttctgctcgga

SEQ ID NO: 3366 - DNA, 30 bp, synthetic construct
  misc_feature 1..30: note = Synthetic
  source 1..30: mol_type = other DNA
gtgatgggagccgttcttcttctgctcgga

SEQ ID NO: 3367 - DNA, 30 bp, synthetic construct
  misc_feature 1..30: note = Synthetic
  source 1..30: mol_type = other DNA
gtgatgggagctcttcttcttctgctcgga

SEQ ID NO: 3368 - DNA, 30 bp, synthetic construct; identical to SEQ ID NO: 686
  misc_feature 1..30: note = Synthetic
  source 1..30: mol_type = other DNA

SEQ ID NO: 3369 - DNA, 30 bp, synthetic construct
  misc_feature 1..30: note = Synthetic
  source 1..30: mol_type = other DNA
gtgatgggatcccttcttcttctgctcgga

SEQ ID NO: 3370 - DNA, 30 bp, synthetic construct
  misc_feature 1..30: note = Synthetic
  source 1..30: mol_type = other DNA
gtgatgggtgcccttcttcttctgctcgga

SEQ ID NO: 3371 - DNA, 30 bp, synthetic construct
  misc_feature 1..30: note = Synthetic
  source 1..30: mol_type = other DNA
gtgatgggggcccttcttcttctgctcgga

SEQ ID NO: 3372 - DNA, 30 bp, synthetic construct
  misc_feature 1..30: note = Synthetic
  source 1..30: mol_type = other DNA
gtgatgggcgcccttcttcttctgctcgga

SEQ ID NO: 3373 - DNA, 30 bp, synthetic construct
  misc_feature 1..30: note = Synthetic
  source 1..30: mol_type = other DNA
gtgatggcagcccttcttcttctgctcgga

SEQ ID NO: 3374 - DNA, 30 bp, synthetic construct
  misc_feature 1..30: note = Synthetic
  source 1..30: mol_type = other DNA
gtgatggaagcccttcttcttctgctcgga

SEQ ID NO: 3375 - DNA, 30 bp, synthetic construct
  misc_feature 1..30: note = Synthetic
  source 1..30: mol_type = other DNA
tgtctgaagccatctcttcctcctgaaaat

SEQ ID NO: 3376 - DNA, 30 bp, synthetic construct
  misc_feature 1..30: note = Synthetic
  source 1..30: mol_type = other DNA
tgtctgaagccatcccttcctcctgaaaat

SEQ ID NO: 3377 - DNA, 30 bp, synthetic construct
  misc_feature 1..30: note = Synthetic
  source 1..30: mol_type = other DNA
tgtctgaagccatcacttcctcctgaaaat

SEQ ID NO: 3378 - DNA, 30 bp, synthetic construct
  misc_feature 1..30: note = Synthetic
  source 1..30: mol_type = other DNA
tgtctgaagccattgcttcctcctgaaaat

SEQ ID NO: 3379 - DNA, 30 bp, synthetic construct
  misc_feature 1..30: note = Synthetic
  source 1..30: mol_type = other DNA
tgtctgaagccagcgcttcctcctgaaaat

SEQ ID NO: 3380 - DNA, 30 bp, synthetic construct
  misc_feature 1..30: note = Synthetic
  source 1..30: mol_type = other DNA
tgtctgaagccaccgcttcctcctgaaaat

SEQ ID NO: 3381 - DNA, 30 bp, synthetic construct
  misc_feature 1..30: note = Synthetic
  source 1..30: mol_type = other DNA
tgtctgaagccaacgcttcctcctgaaaat

SEQ ID NO: 3382 - DNA, 30 bp, synthetic construct
  misc_feature 1..30: note = Synthetic
  source 1..30: mol_type = other DNA
tgtctgaagccttcgcttcctcctgaaaat

SEQ ID NO: 3383 - DNA, 30 bp, synthetic construct
  misc_feature 1..30: note = Synthetic
  source 1..30: mol_type = other DNA
tgtctgaagccgtcgcttcctcctgaaaat

SEQ ID NO: 3384 - DNA, 30 bp, synthetic construct
  misc_feature 1..30: note = Synthetic
  source 1..30: mol_type = other DNA
tgtctgaagccctcgcttcctcctgaaaat

SEQ ID NO: 3385 - DNA, 30 bp, synthetic construct
  misc_feature 1..30: note = Synthetic
  source 1..30: mol_type = other DNA
tgtctgaagcaatcgcttcctcctgaaaat

SEQ ID NO: 3386 - DNA, 30 bp, synthetic construct
  misc_feature 1..30: note = Synthetic
  source 1..30: mol_type = other DNA
tgtctgaaggcatcgcttcctcctgaaaat

SEQ ID NO: 3387 - DNA, 35 bp, synthetic construct
  misc_feature 1..35: note = Synthetic
  source 1..35: mol_type = other DNA
aatgtgccatctggagccctcttctggcctgcaga

SEQ ID NO: 3388 - DNA, 35 bp, synthetic construct
  misc_feature 1..35: note = Synthetic
  source 1..35: mol_type = other DNA
aatgtgccatctggagccctcgtctggcctgcaga

SEQ ID NO: 3389 - DNA, 35 bp, synthetic construct
  misc_feature 1..35: note = Synthetic
  source 1..35: mol_type = other DNA
aatgtgccatctggagccctcctctggcctgcaga

SEQ ID NO: 3390 - DNA, 35 bp, synthetic construct
  misc_feature 1..35: note = Synthetic
  source 1..35: mol_type = other DNA
aatgtgccatctggagcccttatctggcctgcaga

SEQ ID NO: 3391 - DNA, 35 bp, synthetic construct
  misc_feature 1..35: note = Synthetic
  source 1..35: mol_type = other DNA
aatgtgccatctggagcccgcatctggcctgcaga

SEQ ID NO: 3392 - DNA, 35 bp, synthetic construct
  misc_feature 1..35: note = Synthetic
  source 1..35: mol_type = other DNA
aatgtgccatctggagcccccatctggcctgcaga

SEQ ID NO: 3393 - DNA, 35 bp, synthetic construct
  misc_feature 1..35: note = Synthetic
  source 1..35: mol_type = other DNA
aatgtgccatctggagcccacatctggcctgcaga

SEQ ID NO: 3394 - DNA, 35 bp, synthetic construct
  misc_feature 1..35: note = Synthetic
  source 1..35: mol_type = other DNA
aatgtgccatctggagcactcatctggcctgcaga

SEQ ID NO: 3395 - DNA, 35 bp, synthetic construct
  misc_feature 1..35: note = Synthetic
  source 1..35: mol_type = other DNA
aatgtgccatctggaggcctcatctggcctgcaga

SEQ ID NO: 3396 - DNA, 35 bp, synthetic construct
  misc_feature 1..35: note = Synthetic
  source 1..35: mol_type = other DNA
aatgtgccatctggatccctcatctggcctgcaga

SEQ ID NO: 3397 - DNA, 35 bp, synthetic construct
  misc_feature 1..35: note = Synthetic
  source 1..35: mol_type = other DNA
aatgtgccatctggaaccctcatctggcctgcaga

SEQ ID NO: 3398 - DNA, 35 bp, synthetic construct
  misc_feature 1..35: note = Synthetic
  source 1..35: mol_type = other DNA
aatgtgccatctgcagccctcatctggcctgcaga

SEQ ID NO: 3399 - DNA, 24 bp, synthetic construct
  misc_feature 1..24: note = Synthetic
  source 1..24: mol_type = other DNA
gtcacccctggttctggcaccagg

SEQ ID NO: 3400 - DNA, 24 bp, synthetic construct
  misc_feature 1..24: note = Synthetic
  source 1..24: mol_type = other DNA
gtcacccctgcttctggcaccagg

SEQ ID NO: 3401 - DNA, 24 bp, synthetic construct
  misc_feature 1..24: note = Synthetic
  source 1..24: mol_type = other DNA
gtcacccctttttctggcaccagg

SEQ ID NO: 3402 - DNA, 24 bp, synthetic construct
  misc_feature 1..24: note = Synthetic
  source 1..24: mol_type = other DNA
gtcacccctctttctggcaccagg

SEQ ID NO: 3403 - DNA, 24 bp, synthetic construct
  misc_feature 1..24: note = Synthetic
  source 1..24: mol_type = other DNA
gtcacccctatttctggcaccagg

SEQ ID NO: 3404 - DNA, 24 bp, synthetic construct
  misc_feature 1..24: note = Synthetic
  source 1..24: mol_type = other DNA
gtcaccccagtttctggcaccagg

SEQ ID NO: 3405 - DNA, 24 bp, synthetic construct
  misc_feature 1..24: note = Synthetic
  source 1..24: mol_type = other DNA
gtcacccttgtttctggcaccagg

SEQ ID NO: 3406 - DNA, 24 bp, synthetic construct
  misc_feature 1..24: note = Synthetic
  source 1..24: mol_type = other DNA
gtcaccactgtttctggcaccagg

SEQ ID NO: 3407 - DNA, 24 bp, synthetic construct
  misc_feature 1..24: note = Synthetic
  source 1..24: mol_type = other DNA
gtcacgcctgtttctggcaccagg

SEQ ID NO: 3408 - DNA, 32 bp, synthetic construct
  misc_feature 1..32: note = Synthetic
  source 1..32: mol_type = other DNA
gccctcccgtctcccctgtttctggcaccagg

SEQ ID NO: 3409 - DNA, 32 bp, synthetic construct
  misc_feature 1..32: note = Synthetic
  source 1..32: mol_type = other DNA
gccctcccgtcgcccctgtttctggcaccagg

SEQ ID NO: 3410 - DNA, 32 bp, synthetic construct
  misc_feature 1..32: note = Synthetic
  source 1..32: mol_type = other DNA
gccctcccgtcccccctgtttctggcaccagg

SEQ ID NO: 3411 - DNA, 42 bp, synthetic construct
  misc_feature 1..42: note = Synthetic
  source 1..42: mol_type = other DNA
tggaggaagcagggcttcctttcctctgccgtgctcagtctg

SEQ ID NO: 3412 - DNA, 37 bp, synthetic construct
  misc_feature 1..37: note = Synthetic
  source 1..37: mol_type = other DNA
tggaggaagcagggcttcctttcccgtgctcagtctg

SEQ ID NO: 3413 - DNA, 32 bp, synthetic construct
  misc_feature 1..32: note = Synthetic
  source 1..32: mol_type = other DNA
tggaggaagcagggcttcccgtgctcagtctg

SEQ ID NO: 3414 - DNA, 39 bp, synthetic construct
  misc_feature 1..39: note = Synthetic
  source 1..39: mol_type = other DNA
tgtcctgcgacgccctctggaggaagcgtgctcagtctg

SEQ ID NO: 3415 - DNA, 34 bp, synthetic construct
  misc_feature 1..34: note = Synthetic
  source 1..34: mol_type = other DNA
tgtcctgcgacgccctctggacgtgctcagtctg

SEQ ID NO: 3416 - DNA, 33 bp, synthetic construct
  misc_feature 1..33: note = Synthetic
  source 1..33: mol_type = other DNA
agtatcccggtgcaggagctcgtgctcagtctg

SEQ ID NO: 3417 - DNA, 24 bp, synthetic construct
  misc_feature 1..24: note = Synthetic
  source 1..24: mol_type = other DNA
tctgccatcatcgtgctcagtctg

SEQ ID NO: 3418 - DNA, 26 bp, synthetic construct
  misc_feature 1..26: note = Synthetic
  source 1..26: mol_type = other DNA
tctgccatcaaagcgtgctcagtctg

SEQ ID NO: 3419 - DNA, 22 bp, synthetic construct
  misc_feature 1..22: note = Synthetic
  source 1..22: mol_type = other DNA
tctgccatccgtgctcagtctg

SEQ ID NO: 3420 - DNA, 44 bp, synthetic construct
  misc_feature 1..44: note = Synthetic
  source 1..44: mol_type = other DNA
tggaggaagcagggcttcctttcctctgccacgtgctcagtctg

SEQ ID NO: 3421 - DNA, 30 bp, synthetic construct
  misc_feature 1..30: note = Synthetic
  source 1..30: mol_type = other DNA
aacgaacacctcagagtaatgactaagatg

SEQ ID NO: 3422 - DNA, 32 bp, synthetic construct; identical to SEQ ID NO: 648
  misc_feature 1..32: note = Synthetic
  source 1..32: mol_type = other DNA

SEQ ID NO: 3423 - DNA, 28 bp, synthetic construct
  misc_feature 1..28: note = Synthetic
  source 1..28: mol_type = other DNA
aacgaacacccaggtaatgactaagatg

SEQ ID NO: 3424 - DNA, 26 bp, synthetic construct
  misc_feature 1..26: note = Synthetic
  source 1..26: mol_type = other DNA
aacgaacacaggtaatgactaagatg

SEQ ID NO: 3425 - DNA, 32 bp, synthetic construct
  misc_feature 1..32: note = Synthetic
  source 1..32: mol_type = other DNA
ggaaaagcgatccagggtgctgcagaagggat

SEQ ID NO: 3426 - DNA, 34 bp, synthetic construct; identical to SEQ ID NO: 692
  misc_feature 1..34: note = Synthetic
  source 1..34: mol_type = other DNA

SEQ ID NO: 3427 - DNA, 30 bp, synthetic construct
  misc_feature 1..30: note = Synthetic
  source 1..30: mol_type = other DNA
ggaaaagcgatcaggtgctgcagaagggat

SEQ ID NO: 3428 - DNA, 28 bp, synthetic construct
  misc_feature 1..28: note = Synthetic
  source 1..28: mol_type = other DNA
ggaaaagcgaaggtgctgcagaagggat

SEQ ID NO: 3429 - DNA, 31 bp, synthetic construct
  misc_feature 1..31: note = Synthetic
  source 1..31: mol_type = other DNA
gtgatgggagcaccttcttcttctgctcgga

SEQ ID NO: 3430 - DNA, 33 bp, synthetic construct; identical to SEQ ID NO: 688
  misc_feature 1..33: note = Synthetic
  source 1..33: mol_type = other DNA

SEQ ID NO: 3431 - DNA, 29 bp, synthetic construct
  misc_feature 1..29: note = Synthetic
  source 1..29: mol_type = other DNA
gtgatgggagccttcttcttctgctcgga

SEQ ID NO: 3432 - DNA, 27 bp, synthetic construct
  misc_feature 1..27: note = Synthetic
  source 1..27: mol_type = other DNA
gtgatgggagttcttcttctgctcgga

SEQ ID NO: 3433 - DNA, 31 bp, synthetic construct
  misc_feature 1..31: note = Synthetic
  source 1..31: mol_type = other DNA
tgtctgaagccatcggcttcctcctgaaaat

SEQ ID NO: 3434 - DNA, 33 bp, synthetic construct
  misc_feature 1..33: note = Synthetic
  source 1..33: mol_type = other DNA
tgtctgaagccatccatgcttcctcctgaaaat

SEQ ID NO: 3435 - DNA, 29 bp, synthetic construct
  misc_feature 1..29: note = Synthetic
  source 1..29: mol_type = other DNA
tgtctgaagccatgcttcctcctgaaaat

SEQ ID NO: 3436 - DNA, 27 bp, synthetic construct
  misc_feature 1..27: note = Synthetic
  source 1..27: mol_type = other DNA
tgtctgaagccgcttcctcctgaaaat

SEQ ID NO: 3437 - DNA, 36 bp, synthetic construct
  misc_feature 1..36: note = Synthetic
  source 1..36: mol_type = other DNA
aatgtgccatctggagccgctcatctggcctgcaga

SEQ ID NO: 3438 - DNA, 38 bp, synthetic construct
  misc_feature 1..38: note = Synthetic
  source 1..38: mol_type = other DNA
aatgtgccatctggagcccttgtcatctggcctgcaga

SEQ ID NO: 3439 - DNA, 34 bp, synthetic construct
  misc_feature 1..34: note = Synthetic
  source 1..34: mol_type = other DNA
aatgtgccatctggagccccatctggcctgcaga

SEQ ID NO: 3440 - DNA, 32 bp, synthetic construct
  misc_feature 1..32: note = Synthetic
  source 1..32: mol_type = other DNA
aatgtgccatctggagccatctggcctgcaga

SEQ ID NO: 3441 - DNA, 29 bp, synthetic construct
  misc_feature 1..29: note = Synthetic
  source 1..29: mol_type = other DNA
tcccgtcacccgctgtttctggcaccagg

SEQ ID NO: 3442 - DNA, 31 bp, synthetic construct
  misc_feature 1..31: note = Synthetic
  source 1..31: mol_type = other DNA
tcccgtcacccctgtgatttctggcaccagg

SEQ ID NO: 3443 - DNA, 27 bp, synthetic construct
  misc_feature 1..27: note = Synthetic
  source 1..27: mol_type = other DNA
tcccgtcaccccgtttctggcaccagg

SEQ ID NO: 3444 - DNA, 25 bp, synthetic construct
  misc_feature 1..25: note = Synthetic
  source 1..25: mol_type = other DNA
tcccgtcaccgtttctggcaccagg

SEQ ID NO: 3445 - DNA, 49 bp, synthetic construct
  misc_feature 1..49: note = Synthetic
  source 1..49: mol_type = other DNA
tggaggaagcagggcttcctttcctctgcatcaaagcgtgctcagtctg

SEQ ID NO: 3446 - DNA, 50 bp, synthetic construct
  misc_feature 1..50: note = Synthetic
  source 1..50: mol_type = other DNA
tggaggaagcagggcttcctttcctctgccatgaaagcgtgctcagtctg

SEQ ID NO: 3447 - DNA, 46 bp, synthetic construct
  misc_feature 1..46: note = Synthetic
  source 1..46: mol_type = other DNA
tggaggaagcagggcttcctttcctctgcgatccgtgctcagtctg

SEQ ID NO: 3448 - DNA, 47 bp, synthetic construct
  misc_feature 1..47: note = Synthetic
  source 1..47: mol_type = other DNA
tggaggaagcagggcttcctttcctctgacatgacgtgctcagtctg

SEQ ID NO: 3449 - DNA, 29 bp, synthetic construct
  misc_feature 1..29: note = Synthetic
  source 1..29: mol_type = other DNA
aacgaacaccattggtaatgactaagatg

SEQ ID NO: 3450 - DNA, 30 bp, synthetic construct
  misc_feature 1..30: note = Synthetic
  source 1..30: mol_type = other DNA
aacgaacacgtcagtgtaatgactaagatg

SEQ ID NO: 3451 - DNA, 27 bp, synthetic construct
  misc_feature 1..27: note = Synthetic
  source 1..27: mol_type = other DNA
aacgaacaactcgtaatgactaagatg

SEQ ID NO: 3452 - DNA, 29 bp, synthetic construct
  misc_feature 1..29: note = Synthetic
  source 1..29: mol_type = other DNA
aacgaacacatcatgtaatgactaagatg

SEQ ID NO: 3453 - DNA, 30 bp, synthetic construct
  misc_feature 1..30: note = Synthetic
  source 1..30: mol_type = other DNA
ggaaaagcgatcggtagctgcagaagggat

SEQ ID NO: 3454 - DNA, 32 bp, synthetic construct
  misc_feature 1..32: note = Synthetic
  source 1..32: mol_type = other DNA
ggaaaagcgattcaggtagctgcagaagggat

SEQ ID NO: 3455 - DNA, 30 bp, synthetic construct
  misc_feature 1..30: note = Synthetic
  source 1..30: mol_type = other DNA
ggaaaagcgatcaagtgctgcagaagggat

SEQ ID NO: 3456 - DNA, 20 bp, synthetic construct
  misc_feature 1..20: note = Synthetic
  source 1..20: mol_type = other DNA
gtcaaccagtatcccggtgc

SEQ ID NO: 3457 - DNA, 20 bp, synthetic construct
  misc_feature 1..20: note = Synthetic
  source 1..20: mol_type = other DNA
gtcaaccagtatcccggtgc

SEQ ID NO: 3458 - DNA, 21 bp, synthetic construct
  misc_feature 1..21: note = Synthetic
  source 1..21: mol_type = other DNA
gtcaaccattaagcaaaacat

SEQ ID NO: 3459 - DNA, 20 bp, synthetic construct
  misc_feature 1..20: note = Synthetic
  source 1..20: mol_type = other DNA
ggggtcccaggtgctgacgt

SEQ ID NO: 3460 - DNA, 20 bp, synthetic construct
  misc_feature 1..20: note = Synthetic
  source 1..20: mol_type = other DNA
gacatcgatgtcctccccat

SEQ ID NO: 3461 - DNA, 21 bp, synthetic construct
  misc_feature 1..21: note = Synthetic
  source 1..21: mol_type = other DNA
gatgaagcactgtgggtacga

SEQ ID NO: 3462 - DNA, 21 bp, synthetic construct
  misc_feature 1..21: note = Synthetic
  source 1..21: mol_type = other DNA
gatgtacagagagcccagggc

SEQ ID NO: 3463 - DNA, 21 bp, synthetic construct
  misc_feature 1..21: note = Synthetic
  source 1..21: mol_type = other DNA
gcccttcagctaaaataaagg

SEQ ID NO: 3464 - DNA, 20 bp, synthetic construct
  misc_feature 1..20: note = Synthetic
  source 1..20: mol_type = other DNA
ggcccagactgagcacgtga

SEQ ID NO: 3465 - DNA, 20 bp, synthetic construct
  misc_feature 1..20: note = Synthetic
  source 1..20: mol_type = other DNA
ggcccagactgagcacgtga

SEQ ID NO: 3466 - DNA, 20 bp, synthetic construct
  misc_feature 1..20: note = Synthetic
  source 1..20: mol_type = other DNA
ggcccagactgagcacgtga

SEQ ID NO: 3467 - DNA, 20 bp, synthetic construct
  misc_feature 1..20: note = Synthetic
  source 1..20: mol_type = other DNA
ggaatcccttctgcagcacc

SEQ ID NO: 3468 - DNA, 20 bp, synthetic construct
  misc_feature 1..20: note = Synthetic
  source 1..20: mol_type = other DNA
ggaatcccttctgcagcacc

SEQ ID NO: 3469 - DNA, 20 bp, synthetic construct
  misc_feature 1..20: note = Synthetic
  source 1..20: mol_type = other DNA
ggaatcccttctgcagcacc

SEQ ID NO: 3470 - DNA, 20 bp, synthetic construct
  misc_feature 1..20: note = Synthetic
  source 1..20: mol_type = other DNA
gagtccgagcagaagaagaa

SEQ ID NO: 3471 - DNA, 20 bp, synthetic construct
  misc_feature 1..20: note = Synthetic
  source 1..20: mol_type = other DNA
gagtccgagcagaagaagaa

SEQ ID NO: 3472 - DNA, 20 bp, synthetic construct
  misc_feature 1..20: note = Synthetic
  source 1..20: mol_type = other DNA
gagtccgagcagaagaagaa

SEQ ID NO: 3473 - DNA, 20 bp, synthetic construct
  misc_feature 1..20: note = Synthetic
  source 1..20: mol_type = other DNA
gagtccgagcagaagaagaa

SEQ ID NO: 3474 - DNA, 20 bp, synthetic construct
  misc_feature 1..20: note = Synthetic
  source 1..20: mol_type = other DNA
gagtccgagcagaagaagaa

SEQ ID NO: 3475 - DNA, 20 bp, synthetic construct
  misc_feature 1..20: note = Synthetic
  source 1..20: mol_type = other DNA
gagtccgagcagaagaagaa

SEQ ID NO: 3476 - DNA, 20 bp, synthetic construct
  misc_feature 1..20: note = Synthetic
  source 1..20: mol_type = other DNA
gagtccgagcagaagaagaa

SEQ ID NO: 3477 - DNA, 20 bp, synthetic construct
  misc_feature 1..20: note = Synthetic
  source 1..20: mol_type = other DNA
ggcccagactgagcacgtga

SEQ ID NO: 3478 - DNA, 20 bp, synthetic construct
  misc_feature 1..20: note = Synthetic
  source 1..20: mol_type = other DNA
ggcccagactgagcacgtga

SEQ ID NO: 3479 - DNA, 23 bp, synthetic construct
  misc_feature 1..23: note = Synthetic
  source 1..23: mol_type = other DNA
tctgtcatcacgtgctcagtctg

SEQ ID NO: 3480 - DNA, 23 bp, synthetic construct
  misc_feature 1..23: note = Synthetic
  source 1..23: mol_type = other DNA
tctgctatcacgtgctcagtctg

SEQ ID NO: 3481 - DNA, 23 bp, synthetic construct
  misc_feature 1..23: note = Synthetic
  source 1..23: mol_type = other DNA
tctgccattacgtgctcagtctg

SEQ ID NO: 3482 - DNA, 31 bp, synthetic construct
  misc_feature 1..31: note = Synthetic
  source 1..31: mol_type = other DNA
ggaaaagtgatccaggtgctgcagaagggat

SEQ ID NO: 3483 - DNA, 31 bp, synthetic construct
  misc_feature 1..31: note = Synthetic
  source 1..31: mol_type = other DNA
ggaaaagcgattcaggtgctgcagaagggat

SEQ ID NO: 3484 - DNA, 31 bp, synthetic construct; identical to SEQ ID NO: 3358
  misc_feature 1..31: note = Synthetic
  source 1..31: mol_type = other DNA

SEQ ID NO: 3485 - DNA, 30 bp, synthetic construct
  misc_feature 1..30: note = Synthetic
  source 1..30: mol_type = other DNA
gtgatgggagtccttcttcttctgctcgga

SEQ ID NO: 3486 - DNA, 30 bp, synthetic construct; identical to SEQ ID NO: 3367
  misc_feature 1..30: note = Synthetic
  source 1..30: mol_type = other DNA

SEQ ID NO: 3487 - DNA, 30 bp, synthetic construct
  misc_feature 1..30: note = Synthetic
  source 1..30: mol_type = other DNA
gtgatgggagcctttcttcttctgctcgga

SEQ ID NO: 3488 - DNA, 30 bp, synthetic construct
  misc_feature 1..30: note = Synthetic
  source 1..30: mol_type = other DNA
gtgatgggagttcttcttcttctgctcgga

SEQ ID NO: 3489 - DNA, 30 bp, synthetic construct
  misc_feature 1..30: note = Synthetic
  source 1..30: mol_type = other DNA
gtgatgggagtctttcttcttctgctcgga

SEQ ID NO: 3490 - DNA, 30 bp, synthetic construct
  misc_feature 1..30: note = Synthetic
  source 1..30: mol_type = other DNA
gtgatgggagcttttcttcttctgctcgga

SEQ ID NO: 3491 - DNA, 30 bp, synthetic construct
  misc_feature 1..30: note = Synthetic
  source 1..30: mol_type = other DNA
gtgatgggagtttttcttcttctgctcgga

SEQ ID NO: 3492 - DNA, 23 bp, synthetic construct
  misc_feature 1..23: note = Synthetic
  source 1..23: mol_type = other DNA
tctgccgtcacgtgctcagtctg

SEQ ID NO: 3493 - DNA, 23 bp, synthetic construct
  misc_feature 1..23: note = Synthetic
  source 1..23: mol_type = other DNA
tctgccatcgcgtgctcagtctg

SEQ ID NO: 3494 - DNA, 20 bp, synthetic construct
  misc_feature 1..20: note = Synthetic
  source 1..20: mol_type = other DNA
ggcccagactgagcacgtga

SEQ ID NO: 3495 - DNA, 20 bp, synthetic construct
  misc_feature 1..20: note = Synthetic
  source 1..20: mol_type = other DNA
ggcccagactgagcacgtga

SEQ ID NO: 3496 - DNA, 20 bp, synthetic construct
  misc_feature 1..20: note = Synthetic
  source 1..20: mol_type = other DNA
gagtccgagcagaagaagaa

SEQ ID NO: 3497 - DNA, 20 bp, synthetic construct
  misc_feature 1..20: note = Synthetic
  source 1..20: mol_type = other DNA
gagtccgagcagaagaagaa

SEQ ID NO: 3498 - DNA, 20 bp, synthetic construct
  misc_feature 1..20: note = Synthetic
  source 1..20: mol_type = other DNA
ggaatcccttctgcagcacc

SEQ ID NO: 3499 - DNA, 20 bp, synthetic construct
  misc_feature 1..20: note = Synthetic
  source 1..20: mol_type = other DNA
ggaatcccttctgcagcacc

SEQ ID NO: 3500 - DNA, 20 bp, synthetic construct
  misc_feature 1..20: note = Synthetic
  source 1..20: mol_type = other DNA
ggcccagactgagcacgtga

SEQ ID NO: 3501 - DNA, 20 bp, synthetic construct
  misc_feature 1..20: note = Synthetic
  source 1..20: mol_type = other DNA
ggcccagactgagcacgtga

SEQ ID NO: 3502 - DNA, 20 bp, synthetic construct
  misc_feature 1..20: note = Synthetic
  source 1..20: mol_type = other DNA
ggcccagactgagcacgtga

SEQ ID NO: 3503 - DNA, 20 bp, synthetic construct
  misc_feature 1..20: note = Synthetic
  source 1..20: mol_type = other DNA
ggcccagactgagcacgtga

SEQ ID NO: 3504 - DNA, 20 bp, synthetic construct
  misc_feature 1..20: note = Synthetic
  source 1..20: mol_type = other DNA
ggcccagactgagcacgtga

SEQ ID NO: 3505 - DNA, 20 bp, synthetic construct
  misc_feature 1..20: note = Synthetic
  source 1..20: mol_type = other DNA
ggcccagactgagcacgtga

SEQ ID NO: 3506 - DNA, 21 bp, synthetic construct
  misc_feature 1..21: note = Synthetic
  source 1..21: mol_type = other DNA
gcatggtgcacctgactcctg

SEQ ID NO: 3507 - DNA, 21 bp, synthetic construct
  misc_feature 1..21: note = Synthetic
  source 1..21: mol_type = other DNA
gcatggtgcacctgactcctg

SEQ ID NO: 3508 - DNA, 21 bp, synthetic construct
  misc_feature 1..21: note = Synthetic
  source 1..21: mol_type = other DNA
gcatggtgcacctgactcctg

SEQ ID NO: 3509 - DNA, 21 bp, synthetic construct
  misc_feature 1..21: note = Synthetic
  source 1..21: mol_type = other DNA
gcatggtgcacctgactcctg

SEQ ID NO: 3510 - DNA, 21 bp, synthetic construct
  misc_feature 1..21: note = Synthetic
  source 1..21: mol_type = other DNA
gcatggtgcacctgactcctg

SEQ ID NO: 3511 - DNA, 21 bp, synthetic construct
  misc_feature 1..21: note = Synthetic
  source 1..21: mol_type = other DNA
gcatggtgcacctgactcctg

SEQ ID NO: 3512 - DNA, 21 bp, synthetic construct
  misc_feature 1..21: note = Synthetic
  source 1..21: mol_type = other DNA
gtacctgaaccgtatatccta

SEQ ID NO: 3513 - DNA, 21 bp, synthetic construct
  misc_feature 1..21: note = Synthetic
  source 1..21: mol_type = other DNA
gatccttccagtcagggccat

SEQ ID NO: 3514 - DNA, 21 bp, synthetic construct
  misc_feature 1..21: note = Synthetic
  source 1..21: mol_type = other DNA
gatccttccagtcagggccat

SEQ ID NO: 3515 - DNA, 20 bp, synthetic construct
  misc_feature 1..20: note = Synthetic
  source 1..20: mol_type = other DNA
gcagtggtggggggccttgg

SEQ ID NO: 3516 - DNA, 20 bp, synthetic construct
  misc_feature 1..20: note = Synthetic
  source 1..20: mol_type = other DNA
ggcccagactgagcacgtga

SEQ ID NO: 3517 - DNA, 20 bp, synthetic construct
  misc_feature 1..20: note = Synthetic
  source 1..20: mol_type = other DNA
ggcccagactgagcacgtga

SEQ ID NO: 3518 - DNA, 20 bp, synthetic construct
  misc_feature 1..20: note = Synthetic
  source 1..20: mol_type = other DNA
gtcatcttagtcattacctg

SEQ ID NO: 3519 - DNA, 21 bp, synthetic construct
  misc_feature 1..21: note = Synthetic
  source 1..21: mol_type = other DNA
gcatggtgcacctgactcctg

SEQ ID NO: 3520 - DNA, 20 bp, synthetic construct
  misc_feature 1..20: note = Synthetic
  source 1..20: mol_type = other DNA
ggcccagactgagcacgtga

SEQ ID NO: 3521 - DNA, 20 bp, synthetic construct
  misc_feature 1..20: note = Synthetic
  source 1..20: mol_type = other DNA
ggcccagactgagcacgtga

SEQ ID NO: 3522 - DNA, 23 bp, synthetic construct
  misc_feature 1..23: note = Synthetic
  source 1..23: mol_type = other DNA
tctgccatgacgtgctcagtctg

SEQ ID NO: 3523 - DNA, 26 bp, synthetic construct
  misc_feature 1..26: note = Synthetic
  source 1..26: mol_type = other DNA
atgggagcccttgttcttctgctcgg

SEQ ID NO: 3524 - DNA, 28 bp, synthetic construct
  misc_feature 1..28: note = Synthetic
  source 1..28: mol_type = other DNA
aaaagcgatcaaggtgctgcagaaggga

SEQ ID NO: 3525 - DNA, 65 bp, synthetic construct
  misc_feature 1..65: note = Synthetic
  source 1..65: mol_type = other DNA
tggaggaagcagggcttcctttcctctgccatcaatgatggtgatgatggtgcgtgctcagtctg

SEQ ID NO: 3526 - DNA, 23 bp, synthetic construct
  misc_feature 1..23: note = Synthetic
  source 1..23: mol_type = other DNA
tctgcaatcacgtgctcagtctg

SEQ ID NO: 3527 - DNA, 26 bp, synthetic construct
  misc_feature 1..26: note = Synthetic
  source 1..26: mol_type = other DNA
tctgccatcaaagcgtgctcagtctg

SEQ ID NO: 3528 - DNA, 27 bp, synthetic construct
  misc_feature 1..27: note = Synthetic
  source 1..27: mol_type = other DNA
agacttctccacaggagtcaggtgcac

SEQ ID NO: 3529 - DNA, 27 bp, synthetic construct
  misc_feature 1..27: note = Synthetic
  source 1..27: mol_type = other DNA
agacttctcctcaggagtcaggtgcac

SEQ ID NO: 3530 - DNA, 27 bp, synthetic construct
  misc_feature 1..27: note = Synthetic
  source 1..27: mol_type = other DNA
agacttctcttcaggagtcaggtgcac

SEQ ID NO: 3531 - DNA, 30 bp, synthetic construct
  misc_feature 1..30: note = Synthetic
  source 1..30: mol_type = other DNA
agtcagggccataggatagatatacggttc

SEQ ID NO: 3532 - DNA, 31 bp, synthetic construct
  misc_feature 1..31: note = Synthetic
  source 1..31: mol_type = other DNA
acctgaaccgtatatcctatggccctgactg

SEQ ID NO: 3533 - DNA, 32 bp, synthetic construct
  misc_feature 1..32: note = Synthetic
  source 1..32: mol_type = other DNA
gtacctgaaccgtatatcttatggccctgact

SEQ ID NO: 3534 - DNA, 24 bp, synthetic construct
  misc_feature 1..24: note = Synthetic
  source 1..24: mol_type = other DNA
atgtagacgccaaggccccccacc

SEQ ID NO: 3535 - DNA, 23 bp, synthetic construct
  misc_feature 1..23: note = Synthetic
  source 1..23: mol_type = other DNA
tctgccatcccgtgctcagtctg

SEQ ID NO: 3536 - DNA, 26 bp, synthetic construct
  misc_feature 1..26: note = Synthetic
  source 1..26: mol_type = other DNA
tctgccatcaaagcgtgctcagtctg

SEQ ID NO: 3537 - DNA, 29 bp, synthetic construct
  misc_feature 1..29: note = Synthetic
  source 1..29: mol_type = other DNA
aacgaacacctcacgtaatgactaagatg

SEQ ID NO: 3538 - DNA, 27 bp, synthetic construct
  misc_feature 1..27: note = Synthetic
  source 1..27: mol_type = other DNA
agacttctccacaggagtcaggtgcac

SEQ ID NO: 3539 - DNA, 65 bp, synthetic construct; identical to SEQ ID NO: 3525
  misc_feature 1..65: note = Synthetic
  source 1..65: mol_type = other DNA

SEQ ID NO: 3540 - DNA, 71 bp, synthetic construct
  misc_feature 1..71: note = Synthetic
  source 1..71: mol_type = other DNA
tggaggaagcagggcttcctttcctctgccatcacttatcgtcgtcatccttgtaatccgtgctcagtctg

SEQ ID NO: 3541 - DNA, 20 bp, synthetic construct
  misc_feature 1..20: note = Synthetic
  source 1..20: mol_type = other DNA
ggcccagactgagcacgtga

SEQ ID NO: 3542 - DNA, 20 bp, synthetic construct
  misc_feature 1..20: note = Synthetic
  source 1..20: mol_type = other DNA
ggcccagactgagcacgtga

SEQ ID NO: 3543 - DNA, 20 bp, synthetic construct
  misc_feature 1..20: note = Synthetic
  source 1..20: mol_type = other DNA
ggcccagactgagcacgtga

SEQ ID NO: 3544 - DNA, 20 bp, synthetic construct
  misc_feature 1..20: note = Synthetic
  source 1..20: mol_type = other DNA
ggcccagactgagcacgtga

SEQ ID NO: 3545 - DNA, 20 bp, synthetic construct
  misc_feature 1..20: note = Synthetic
  source 1..20: mol_type = other DNA
ggcccagactgagcacgtga

SEQ ID NO: 3546 - DNA, 20 bp, synthetic construct
  misc_feature 1..20: note = Synthetic
  source 1..20: mol_type = other DNA
gtcatcttagtcattacctg

SEQ ID NO: 3547 - DNA, 20 bp, synthetic construct
  misc_feature 1..20: note = Synthetic
  source 1..20: mol_type = other DNA
gagtccgagcagaagaagaa

SEQ ID NO: 3548 - DNA, 20 bp, synthetic construct
  misc_feature 1..20: note = Synthetic
  source 1..20: mol_type = other DNA
gtaacggcagacttctcctc

SEQ ID NO: 3549 - DNA, 22 bp, synthetic construct
  misc_feature 1..22: note = Synthetic
  source 1..22: mol_type = other DNA
tctgccatccgtgctcagtctg

SEQ ID NO: 3550 - DNA, 24 bp, synthetic construct
  misc_feature 1..24: note = Synthetic
  source 1..24: mol_type = other DNA
tctgccatcatcgtgctcagtctg

SEQ ID NO: 3551 - DNA, 26 bp, synthetic construct
  misc_feature 1..26: note = Synthetic
  source 1..26: mol_type = other DNA
tctgccatcaaagcgtgctcagtctg

SEQ ID NO: 3552 - DNA, 23 bp, synthetic construct
  misc_feature 1..23: note = Synthetic
  source 1..23: mol_type = other DNA
tctgccatgacgtgctcagtctg

SEQ ID NO: 3553 - DNA, 71 bp, synthetic construct; identical to SEQ ID NO: 3540
  misc_feature 1..71: note = Synthetic
  source 1..71: mol_type = other DNA

SEQ ID NO: 3554 - DNA, 29 bp, synthetic construct
  misc_feature 1..29: note = Synthetic
  source 1..29: mol_type = other DNA
aacgaacacctcatgtaatgactaagatg

SEQ ID NO: 3555 - DNA, 26 bp, synthetic construct
  misc_feature 1..26: note = Synthetic
  source 1..26: mol_type = other DNA
atgggagcccttgttcttctgctcgg

SEQ ID NO: 3556 - DNA, 26 bp, synthetic construct
  misc_feature 1..26: note = Synthetic
  source 1..26: mol_type = other DNA
atctgactcctgtggagaagtctgcc

SEQ ID NO: 3557 - DNA, 20 bp, synthetic construct
  misc_feature 1..20: note = Synthetic
  source 1..20: mol_type = other DNA
gatgtctgcaggccagatga

SEQ ID NO: 3558 - DNA, 20 bp, synthetic construct
  misc_feature 1..20: note = Synthetic
  source 1..20: mol_type = other DNA
gatgtctgcaggccagatga

SEQ ID NO: 3559 - DNA, 20 bp, synthetic construct
  misc_feature 1..20: note = Synthetic
  source 1..20: mol_type = other DNA
gatgtctgcaggccagatga

SEQ ID NO: 3560 - DNA, 20 bp, synthetic construct
  misc_feature 1..20: note = Synthetic
  source 1..20: mol_type = other DNA
gatgtctgcaggccagatga

SEQ ID NO: 3561 - DNA, 20 bp, synthetic construct
  misc_feature 1..20: note = Synthetic
  source 1..20: mol_type = other DNA
gatgtctgcaggccagatga

SEQ ID NO: 3562 - DNA, 20 bp, synthetic construct
  misc_feature 1..20: note = Synthetic
  source 1..20: mol_type = other DNA
gatgtctgcaggccagatga

SEQ ID NO: 3563 - DNA, 20 bp, synthetic construct
  misc_feature 1..20: note = Synthetic
  source 1..20: mol_type = other DNA
gatgtctgcaggccagatga

SEQ ID NO: 3564 - DNA, 20 bp, synthetic construct
  misc_feature 1..20: note = Synthetic
  source 1..20: mol_type = other DNA
gatgtctgcaggccagatga

SEQ ID NO: 3565 - DNA, 20 bp, synthetic construct
  misc_feature 1..20: note = Synthetic
  source 1..20: mol_type = other DNA
gatgtctgcaggccagatga

SEQ ID NO: 3566 - DNA, 20 bp, synthetic construct
  misc_feature 1..20: note = Synthetic
  source 1..20: mol_type = other DNA
gatgtctgcaggccagatga

SEQ ID NO: 3567 - DNA, 20 bp, synthetic construct
  misc_feature 1..20: note = Synthetic
  source 1..20: mol_type = other DNA
gatgtctgcaggccagatga

SEQ ID NO: 3568 - DNA, 20 bp, synthetic construct
  misc_feature 1..20: note = Synthetic
  source 1..20: mol_type = other DNA
gatgtctgcaggccagatga

SEQ ID NO: 3569 - DNA, 20 bp, synthetic construct
  misc_feature 1..20: note = Synthetic
  source 1..20: mol_type = other DNA
gatgtctgcaggccagatga

SEQ ID NO: 3570 - DNA, 20 bp, synthetic construct
  misc_feature 1..20: note = Synthetic
  source 1..20: mol_type = other DNA
gatgtctgcaggccagatga

SEQ ID NO: 3571 - DNA, 20 bp, synthetic construct
  misc_feature 1..20: note = Synthetic
  source 1..20: mol_type = other DNA
gatgtctgcaggccagatga

SEQ ID NO: 3572 - DNA, 20 bp, synthetic construct
  misc_feature 1..20: note = Synthetic
  source 1..20: mol_type = other DNA
gatgtctgcaggccagatga

SEQ ID NO: 3573 - DNA, 20 bp, synthetic construct
  misc_feature 1..20: note = Synthetic
  source 1..20: mol_type = other DNA
gatgtctgcaggccagatga

SEQ ID NO: 3574 - DNA, 20 bp, synthetic construct
  misc_feature 1..20: note = Synthetic
  source 1..20: mol_type = other DNA
gatgtctgcaggccagatga

SEQ ID NO: 3575 - DNA, 20 bp, synthetic construct
  misc_feature 1..20: note = Synthetic
  source 1..20: mol_type = other DNA
gatgtctgcaggccagatga

SEQ ID NO: 3576 - DNA, 20 bp, synthetic construct
  misc_feature 1..20: note = Synthetic
  source 1..20: mol_type = other DNA
gatgtctgcaggccagatga

SEQ ID NO: 3577 - DNA, 20 bp, synthetic construct
  misc_feature 1..20: note = Synthetic
  source 1..20: mol_type = other DNA
gatgtctgcaggccagatga

SEQ ID NO: 3578 - DNA, 20 bp, synthetic construct
  misc_feature 1..20: note = Synthetic
  source 1..20: mol_type = other DNA
gatgtctgcaggccagatga

SEQ ID NO: 3579 - DNA, 20 bp, synthetic construct
  misc_feature 1..20: note = Synthetic
  source 1..20: mol_type = other DNA
gatgtctgcaggccagatga

SEQ ID NO: 3580 - DNA, 20 bp, synthetic construct
  misc_feature 1..20: note = Synthetic
  source 1..20: mol_type = other DNA
gatgtctgcaggccagatga

SEQ ID NO: 3581 - DNA, 20 bp, synthetic construct
  misc_feature 1..20: note = Synthetic
  source 1..20: mol_type = other DNA
gattcctggtgccagaaaca

SEQ ID NO: 3582 - DNA, 20 bp, synthetic construct
  misc_feature 1..20: note = Synthetic
  source 1..20: mol_type = other DNA
gattcctggtgccagaaaca

SEQ ID NO: 3583 - DNA, 20 bp, synthetic construct
  misc_feature 1..20: note = Synthetic
  source 1..20: mol_type = other DNA
gattcctggtgccagaaaca

SEQ ID NO: 3584 - DNA, 20 bp, synthetic construct
  misc_feature 1..20: note = Synthetic
  source 1..20: mol_type = other DNA
gattcctggtgccagaaaca

SEQ ID NO: 3585 - DNA, 20 bp, synthetic construct
  misc_feature 1..20: note = Synthetic
  source 1..20: mol_type = other DNA
gattcctggtgccagaaaca

SEQ ID NO: 3586 - DNA, 20 bp, synthetic construct
  misc_feature 1..20: note = Synthetic
  source 1..20: mol_type = other DNA
gattcctggtgccagaaaca

SEQ ID NO: 3587 - DNA, 20 bp, synthetic construct
  misc_feature 1..20: note = Synthetic
  source 1..20: mol_type = other DNA
gattcctggtgccagaaaca

SEQ ID NO: 3588 - DNA, 20 bp, synthetic construct
  misc_feature 1..20: note = Synthetic
  source 1..20: mol_type = other DNA
gattcctggtgccagaaaca

SEQ ID NO: 3589 - DNA, 20 bp, synthetic construct
  misc_feature 1..20: note = Synthetic
  source 1..20: mol_type = other DNA
gattcctggtgccagaaaca

SEQ ID NO: 3590 - DNA, 20 bp, synthetic construct
  misc_feature 1..20: note = Synthetic
  source 1..20: mol_type = other DNA
gattcctggtgccagaaaca

SEQ ID NO: 3591 - DNA, 20 bp, synthetic construct
  misc_feature 1..20: note = Synthetic
  source 1..20: mol_type = other DNA
gattcctggtgccagaaaca

SEQ ID NO: 3592 - DNA, 20 bp, synthetic construct
  misc_feature 1..20: note = Synthetic
  source 1..20: mol_type = other DNA
gattcctggtgccagaaaca

SEQ ID NO: 3593 - DNA, 20 bp, synthetic construct
  misc_feature 1..20: note = Synthetic
  source 1..20: mol_type = other DNA
gattcctggtgccagaaaca

SEQ ID NO: 3594 - DNA, 20 bp, synthetic construct
  misc_feature 1..20: note = Synthetic
  source 1..20: mol_type = other DNA
gattcctggtgccagaaaca

SEQ ID NO: 3595 - DNA, 20 bp, synthetic construct
  misc_feature 1..20: note = Synthetic
  source 1..20: mol_type = other DNA
gattcctggtgccagaaaca

SEQ ID NO: 3596 - DNA, 20 bp, synthetic construct
  misc_feature 1..20: note = Synthetic
  source 1..20: mol_type = other DNA
gattcctggtgccagaaaca

SEQ ID NO: 3597 - DNA, 20 bp, synthetic construct
  misc_feature 1..20: note = Synthetic
  source 1..20: mol_type = other DNA
gattcctggtgccagaaaca

SEQ ID NO: 3598 - DNA, 20 bp, synthetic construct
  misc_feature 1..20: note = Synthetic
  source 1..20: mol_type = other DNA
gattcctggtgccagaaaca

SEQ ID NO: 3599 - DNA, 20 bp, synthetic construct
  misc_feature 1..20: note = Synthetic
  source 1..20: mol_type = other DNA
gattcctggtgccagaaaca

SEQ ID NO: 3600 - DNA, 20 bp, synthetic construct
  misc_feature 1..20: note = Synthetic
  source 1..20: mol_type = other DNA
gattcctggtgccagaaaca

SEQ ID NO: 3601 - DNA, 20 bp, synthetic construct
  misc_feature 1..20: note = Synthetic
  source 1..20: mol_type = other DNA
gattcctggtgccagaaaca

SEQ ID NO: 3602 - DNA, 20 bp, synthetic construct
  misc_feature 1..20: note = Synthetic
  source 1..20: mol_type = other DNA
gattcctggtgccagaaaca

SEQ ID NO: 3603 - DNA, 20 bp, synthetic construct
  misc_feature 1..20: note = Synthetic
  source 1..20: mol_type = other DNA
gattcctggtgccagaaaca

SEQ ID NO: 3604 - DNA, 20 bp, synthetic construct
  misc_feature 1..20: note = Synthetic
  source 1..20: mol_type = other DNA
gattcctggtgccagaaaca

SEQ ID NO: 3605 - DNA, 20 bp, synthetic construct
  misc_feature 1..20: note = Synthetic
  source 1..20: mol_type = other DNA
gcattttcaggaggaagcga

SEQ ID NO: 3606 - DNA, 20 bp, synthetic construct
  misc_feature 1..20: note = Synthetic
  source 1..20: mol_type = other DNA
gcattttcaggaggaagcga

SEQ ID NO: 3607 - DNA, 20 bp, synthetic construct
  misc_feature 1..20: note = Synthetic
  source 1..20: mol_type = other DNA
gcattttcaggaggaagcga

SEQ ID NO: 3608 - DNA, 20 bp, synthetic construct
  misc_feature 1..20: note = Synthetic
  source 1..20: mol_type = other DNA
gcattttcaggaggaagcga

SEQ ID NO: 3609 - DNA, 20 bp, synthetic construct
  misc_feature 1..20: note = Synthetic
  source 1..20: mol_type = other DNA
gcattttcaggaggaagcga

SEQ ID NO: 3610 - DNA, 20 bp, synthetic construct
  misc_feature 1..20: note = Synthetic
  source 1..20: mol_type = other DNA
gcattttcaggaggaagcga

SEQ ID NO: 3611 - DNA, 20 bp, synthetic construct
  misc_feature 1..20: note = Synthetic
  source 1..20: mol_type = other DNA
gcattttcaggaggaagcga

SEQ ID NO: 3612 - DNA, 20 bp, synthetic construct
  misc_feature 1..20: note = Synthetic
  source 1..20: mol_type = other DNA
gcattttcaggaggaagcga

SEQ ID NO: 3613 - DNA, 20 bp, synthetic construct
  misc_feature 1..20: note = Synthetic
  source 1..20: mol_type = other DNA
gcattttcaggaggaagcga

SEQ ID NO: 3614 - DNA, 20 bp, synthetic construct
  misc_feature 1..20: note = Synthetic
  source 1..20: mol_type = other DNA
gcattttcaggaggaagcga

SEQ ID NO: 3615 - DNA, 20 bp, synthetic construct
  misc_feature 1..20: note = Synthetic
  source 1..20: mol_type = other DNA
gcattttcaggaggaagcga

SEQ ID NO: 3616 - DNA, 20 bp, synthetic construct
  misc_feature 1..20: note = Synthetic
  source 1..20: mol_type = other DNA
gcattttcaggaggaagcga

SEQ ID NO: 3617 - DNA, 20 bp, synthetic construct
  misc_feature 1..20: note = Synthetic
  source 1..20: mol_type = other DNA
gcattttcaggaggaagcga

SEQ ID NO: 3618 - DNA, 20 bp, synthetic construct
  misc_feature 1..20: note = Synthetic
  source 1..20: mol_type = other DNA
gcattttcaggaggaagcga

SEQ ID NO: 3619 - DNA, 20 bp, synthetic construct
  misc_feature 1..20: note = Synthetic
  source 1..20: mol_type = other DNA
gcattttcaggaggaagcga

SEQ ID NO: 3620 - DNA, 20 bp, synthetic construct
  misc_feature 1..20: note = Synthetic
  source 1..20: mol_type = other DNA
gcattttcaggaggaagcga

SEQ ID NO: 3621 - DNA, 20 bp, synthetic construct
  misc_feature 1..20: note = Synthetic
  source 1..20: mol_type = other DNA
gcattttcaggaggaagcga

SEQ ID NO: 3622 - DNA, 20 bp, synthetic construct
  misc_feature 1..20: note = Synthetic
  source 1..20: mol_type = other DNA
gcattttcaggaggaagcga

SEQ ID NO: 3623 - DNA, 20 bp, synthetic construct
  misc_feature 1..20: note = Synthetic
  source 1..20: mol_type = other DNA
gcattttcaggaggaagcga

SEQ ID NO: 3624 - DNA, 20 bp, synthetic construct
  misc_feature 1..20: note = Synthetic
  source 1..20: mol_type = other DNA
gcattttcaggaggaagcga

SEQ ID NO: 3625 - DNA, 20 bp, synthetic construct
  misc_feature 1..20: note = Synthetic
  source 1..20: mol_type = other DNA
gcattttcaggaggaagcga

SEQ ID NO: 3626 - DNA, 20 bp, synthetic construct
  misc_feature 1..20: note = Synthetic
  source 1..20: mol_type = other DNA
gcattttcaggaggaagcga

SEQ ID NO: 3627 - DNA, 20 bp, synthetic construct
  misc_feature 1..20: note = Synthetic
  source 1..20: mol_type = other DNA
gcattttcaggaggaagcga

SEQ ID NO: 3628 - DNA, 44 bp, synthetic construct
  misc_feature 1..44: note = Synthetic
  source 1..44: mol_type = other DNA
ccctctgacaatgtgccatctggagcactcatctggcctgcaga

SEQ ID NO: 3629 - DNA, 43 bp, synthetic construct
  misc_feature 1..43: note = Synthetic
  source 1..43: mol_type = other DNA
cctctgacaatgtgccatctggagcactcatctggcctgcaga

SEQ ID NO: 3630 - DNA, 42 bp, synthetic construct
  misc_feature 1..42: note = Synthetic
  source 1..42: mol_type = other DNA
ctctgacaatgtgccatctggagcactcatctggcctgcaga

SEQ ID NO: 3631 - DNA, 41 bp, synthetic construct
  misc_feature 1..41: note = Synthetic
  source 1..41: mol_type = other DNA
tctgacaatgtgccatctggagcactcatctggcctgcaga

SEQ ID NO: 3632 - DNA, 40 bp, synthetic construct
  misc_feature 1..40: note = Synthetic
  source 1..40: mol_type = other DNA
ctgacaatgtgccatctggagcactcatctggcctgcaga

SEQ ID NO: 3633 - DNA, 39 bp, synthetic construct
  misc_feature 1..39: note = Synthetic
  source 1..39: mol_type = other DNA
tgacaatgtgccatctggagcactcatctggcctgcaga

SEQ ID NO: 3634 - DNA, 38 bp, synthetic construct
  misc_feature 1..38: note = Synthetic
  source 1..38: mol_type = other DNA
gacaatgtgccatctggagcactcatctggcctgcaga

SEQ ID NO: 3635 - DNA, 37 bp, synthetic construct
  misc_feature 1..37: note = Synthetic
  source 1..37: mol_type = other DNA
acaatgtgccatctggagcactcatctggcctgcaga

SEQ ID NO: 3636 - DNA, 36 bp, synthetic construct
  misc_feature 1..36: note = Synthetic
  source 1..36: mol_type = other DNA
caatgtgccatctggagcactcatctggcctgcaga

SEQ ID NO: 3637 - DNA, 35 bp, synthetic construct; identical to SEQ ID NO: 3394
  misc_feature 1..35: note = Synthetic
  source 1..35: mol_type = other DNA

SEQ ID NO: 3638 - DNA, 34 bp, synthetic construct
  misc_feature 1..34: note = Synthetic
  source 1..34: mol_type = other DNA
atgtgccatctggagcactcatctggcctgcaga

SEQ ID NO: 3639 - DNA, 33 bp, synthetic construct
  misc_feature 1..33: note = Synthetic
  source 1..33: mol_type = other DNA
tgtgccatctggagcactcatctggcctgcaga

SEQ ID NO: 3640 - DNA, 32 bp, synthetic construct
  misc_feature 1..32: note = Synthetic
  source 1..32: mol_type = other DNA
gtgccatctggagcactcatctggcctgcaga

SEQ ID NO: 3641 - DNA, 31 bp, synthetic construct
  misc_feature 1..31: note = Synthetic
  source 1..31: mol_type = other DNA
tgccatctggagcactcatctggcctgcaga

SEQ ID NO: 3642 - DNA, 30 bp, synthetic construct
  misc_feature 1..30: note = Synthetic
  source 1..30: mol_type = other DNA
gccatctggagcactcatctggcctgcaga

SEQ ID NO: 3643 - DNA, 29 bp, synthetic construct
  misc_feature 1..29: note = Synthetic
  source 1..29: mol_type = other DNA
ccatctggagcactcatctggcctgcaga

SEQ ID NO: 3644 - DNA, 28 bp, synthetic construct
  misc_feature 1..28: note = Synthetic
  source 1..28: mol_type = other DNA
catctggagcactcatctggcctgcaga

SEQ ID NO: 3645 - DNA, 27 bp, synthetic construct
  misc_feature 1..27: note = Synthetic
  source 1..27: mol_type = other DNA
atctggagcactcatctggcctgcaga

SEQ ID NO: 3646 - DNA, 26 bp, synthetic construct
  misc_feature 1..26: note = Synthetic
  source 1..26: mol_type = other DNA
tctggagcactcatctggcctgcaga

SEQ ID NO: 3647 - DNA, 25 bp, synthetic construct
  misc_feature 1..25: note = Synthetic
  source 1..25: mol_type = other DNA
ctggagcactcatctggcctgcaga

SEQ ID NO: 3648 - DNA, 24 bp, synthetic construct
  misc_feature 1..24: note = Synthetic
  source 1..24: mol_type = other DNA
tggagcactcatctggcctgcaga

SEQ ID NO: 3649 - DNA, 23 bp, synthetic construct
  misc_feature 1..23: note = Synthetic
  source 1..23: mol_type = other DNA
ggagcactcatctggcctgcaga

SEQ ID NO: 3650 - DNA, 22 bp, synthetic construct
  misc_feature 1..22: note = Synthetic
  source 1..22: mol_type = other DNA
gagcactcatctggcctgcaga

SEQ ID NO: 3651 - DNA, 21 bp, synthetic construct
  misc_feature 1..21: note = Synthetic
  source 1..21: mol_type = other DNA
agcactcatctggcctgcaga

SEQ ID NO: 3652 - DNA, 44 bp, synthetic construct
  misc_feature 1..44: note = Synthetic
  source 1..44: mol_type = other DNA
aggactagttctgccctcccgtcaccactgtttctggcaccagg

SEQ ID NO: 3653 - DNA, 43 bp, synthetic construct
  misc_feature 1..43: note = Synthetic
  source 1..43: mol_type = other DNA
ggactagttctgccctcccgtcaccactgtttctggcaccagg

SEQ ID NO: 3654 - DNA, 42 bp, synthetic construct
  misc_feature 1..42: note = Synthetic
  source 1..42: mol_type = other DNA
gactagttctgccctcccgtcaccactgtttctggcaccagg

SEQ ID NO: 3655 - DNA, 41 bp, synthetic construct
  misc_feature 1..41: note = Synthetic
  source 1..41: mol_type = other DNA
actagttctgccctcccgtcaccactgtttctggcaccagg

SEQ ID NO: 3656 - DNA, 40 bp, synthetic construct
  misc_feature 1..40: note = Synthetic
  source 1..40: mol_type = other DNA
ctagttctgccctcccgtcaccactgtttctggcaccagg

SEQ ID NO: 3657 - DNA, 39 bp, synthetic construct
  misc_feature 1..39: note = Synthetic
  source 1..39: mol_type = other DNA
tagttctgccctcccgtcaccactgtttctggcaccagg

SEQ ID NO: 3658 - DNA, 38 bp, synthetic construct
  misc_feature 1..38: note = Synthetic
  source 1..38: mol_type = other DNA
agttctgccctcccgtcaccactgtttctggcaccagg

SEQ ID NO: 3659 - DNA, 37 bp, synthetic construct
  misc_feature 1..37: note = Synthetic
  source 1..37: mol_type = other DNA
gttctgccctcccgtcaccactgtttctggcaccagg

SEQ ID NO: 3660 - DNA, 36 bp, synthetic construct
  misc_feature 1..36: note = Synthetic
  source 1..36: mol_type = other DNA
ttctgccctcccgtcaccactgtttctggcaccagg

SEQ ID NO: 3661 - DNA, 35 bp, synthetic construct
  misc_feature 1..35: note = Synthetic
  source 1..35: mol_type = other DNA
tctgccctcccgtcaccactgtttctggcaccagg

SEQ ID NO: 3662 - DNA, 34 bp, synthetic construct
  misc_feature 1..34: note = Synthetic
  source 1..34: mol_type = other DNA
ctgccctcccgtcaccactgtttctggcaccagg

SEQ ID NO: 3663 - DNA, 33 bp, synthetic construct
  misc_feature 1..33: note = Synthetic
  source 1..33: mol_type = other DNA
tgccctcccgtcaccactgtttctggcaccagg

SEQ ID NO: 3664 - DNA, 32 bp, synthetic construct
  misc_feature 1..32: note = Synthetic
  source 1..32: mol_type = other DNA
gccctcccgtcaccactgtttctggcaccagg

SEQ ID NO: 3665 - DNA, 31 bp, synthetic construct
  misc_feature 1..31: note = Synthetic
  source 1..31: mol_type = other DNA
ccctcccgtcaccactgtttctggcaccagg

SEQ ID NO: 3666 - DNA, 30 bp, synthetic construct
  misc_feature 1..30: note = Synthetic
  source 1..30: mol_type = other DNA
cctcccgtcaccactgtttctggcaccagg

SEQ ID NO: 3667 - DNA, 29 bp, synthetic construct
  misc_feature 1..29: note = Synthetic
  source 1..29: mol_type = other DNA
ctcccgtcaccactgtttctggcaccagg

SEQ ID NO: 3668 - DNA, 28 bp, synthetic construct
  misc_feature 1..28: note = Synthetic
  source 1..28: mol_type = other DNA
tcccgtcaccactgtttctggcaccagg

SEQ ID NO: 3669 - DNA, 27 bp, synthetic construct
  misc_feature 1..27: note = Synthetic
  source 1..27: mol_type = other DNA
cccgtcaccactgtttctggcaccagg

SEQ ID NO: 3670 - DNA, 26 bp, synthetic construct
  misc_feature 1..26: note = Synthetic
  source 1..26: mol_type = other DNA
ccgtcaccactgtttctggcaccagg

SEQ ID NO: 3671 - DNA, 25 bp, synthetic construct
  misc_feature 1..25: note = Synthetic
  source 1..25: mol_type = other DNA
cgtcaccactgtttctggcaccagg

SEQ ID NO: 3672 - DNA, 24 bp, synthetic construct
  misc_feature 1..24: note = Synthetic
  source 1..24: mol_type = other DNA
gtcaccactgtttctggcaccagg

SEQ ID NO: 3673 - DNA, 23 bp, synthetic construct
  misc_feature 1..23: note = Synthetic
  source 1..23: mol_type = other DNA
tcaccactgtttctggcaccagg

SEQ ID NO: 3674 - DNA, 22 bp, synthetic construct
  misc_feature 1..22: note = Synthetic
  source 1..22: mol_type = other DNA
caccactgtttctggcaccagg

SEQ ID NO: 3675 - DNA, 21 bp, synthetic construct
  misc_feature 1..21: note = Synthetic
  source 1..21: mol_type = other DNA
accactgtttctggcaccagg

SEQ ID NO: 3676 - DNA, 46 bp, synthetic construct
  misc_feature 1..46: note = Synthetic
  source 1..46: mol_type = other DNA
aatgactcaaatatgctgtctgaagcaatcgcttcctcctgaaaat

SEQ ID NO: 3677 - DNA, 45 bp, synthetic construct
  misc_feature 1..45: note = Synthetic
  source 1..45: mol_type = other DNA
atgactcaaatatgctgtctgaagcaatcgcttcctcctgaaaat

SEQ ID NO: 3678 - DNA, 44 bp, synthetic construct
  misc_feature 1..44: note = Synthetic
  source 1..44: mol_type = other DNA
tgactcaaatatgctgtctgaagcaatcgcttcctcctgaaaat

SEQ ID NO: 3679 - DNA, 43 bp, synthetic construct
  misc_feature 1..43: note = Synthetic
  source 1..43: mol_type = other DNA
gactcaaatatgctgtctgaagcaatcgcttcctcctgaaaat

SEQ ID NO: 3680 - DNA, 42 bp, synthetic construct
  misc_feature 1..42: note = Synthetic
  source 1..42: mol_type = other DNA
actcaaatatgctgtctgaagcaatcgcttcctcctgaaaat

SEQ ID NO: 3681 - DNA, 41 bp, synthetic construct
  misc_feature 1..41: note = Synthetic
  source 1..41: mol_type = other DNA
ctcaaatatgctgtctgaagcaatcgcttcctcctgaaaat

SEQ ID NO: 3682 - DNA, 40 bp, synthetic construct
  misc_feature 1..40: note = Synthetic
  source 1..40: mol_type = other DNA
tcaaatatgctgtctgaagcaatcgcttcctcctgaaaat

SEQ ID NO: 3683 - DNA, 39 bp, synthetic construct
  misc_feature 1..39: note = Synthetic
  source 1..39: mol_type = other DNA
caaatatgctgtctgaagcaatcgcttcctcctgaaaat

SEQ ID NO: 3684 - DNA, 38 bp, synthetic construct
  misc_feature 1..38: note = Synthetic
  source 1..38: mol_type = other DNA
aaatatgctgtctgaagcaatcgcttcctcctgaaaat

SEQ ID NO: 3685 - DNA, 37 bp, synthetic construct
  misc_feature 1..37: note = Synthetic
  source 1..37: mol_type = other DNA
aatatgctgtctgaagcaatcgcttcctcctgaaaat

SEQ ID NO: 3686 - DNA, 36 bp, synthetic construct
  misc_feature 1..36: note = Synthetic
  source 1..36: mol_type = other DNA
atatgctgtctgaagcaatcgcttcctcctgaaaat

SEQ ID NO: 3687 - DNA, 35 bp, synthetic construct
  misc_feature 1..35: note = Synthetic
  source 1..35: mol_type = other DNA
tatgctgtctgaagcaatcgcttcctcctgaaaat

SEQ ID NO: 3688 - DNA, 34 bp, synthetic construct
  misc_feature 1..34: note = Synthetic
  source 1..34: mol_type = other DNA
atgctgtctgaagcaatcgcttcctcctgaaaat

SEQ ID NO: 3689 - DNA, 33 bp, synthetic construct
  misc_feature 1..33: note = Synthetic
  source 1..33: mol_type = other DNA
tgctgtctgaagcaatcgcttcctcctgaaaat

SEQ ID NO: 3690 - DNA, 32 bp, synthetic construct
  misc_feature 1..32: note = Synthetic
  source 1..32: mol_type = other DNA
gctgtctgaagcaatcgcttcctcctgaaaat

SEQ ID NO: 3691 - DNA, 31 bp, synthetic construct
  misc_feature 1..31: note = Synthetic
  source 1..31: mol_type = other DNA
ctgtctgaagcaatcgcttcctcctgaaaat

SEQ ID NO: 3692 - DNA, 30 bp, synthetic construct; identical to SEQ ID NO: 3385
  misc_feature 1..30: note = Synthetic
  source 1..30: mol_type = other DNA

SEQ ID NO: 3693 - DNA, 29 bp, synthetic construct
  misc_feature 1..29: note = Synthetic
  source 1..29: mol_type = other DNA
gtctgaagcaatcgcttcctcctgaaaat

SEQ ID NO: 3694 - DNA, 28 bp, synthetic construct
  misc_feature 1..28: note = Synthetic
  source 1..28: mol_type = other DNA
tctgaagcaatcgcttcctcctgaaaat

SEQ ID NO: 3695 - DNA, 27 bp, synthetic construct
  misc_feature 1..27: note = Synthetic
  source 1..27: mol_type = other DNA
ctgaagcaatcgcttcctcctgaaaat

SEQ ID NO: 3696 - DNA, 26 bp, synthetic construct
  misc_feature 1..26: note = Synthetic
  source 1..26: mol_type = other DNA
tgaagcaatcgcttcctcctgaaaat

SEQ ID NO: 3697 - DNA, 25 bp, synthetic construct
  misc_feature 1..25: note = Synthetic
  source 1..25: mol_type = other DNA
gaagcaatcgcttcctcctgaaaat

SEQ ID NO: 3698 - DNA, 24 bp, synthetic construct
  misc_feature 1..24: note = Synthetic
  source 1..24: mol_type = other DNA
aagcaatcgcttcctcctgaaaat

SEQ ID NO: 3699 - DNA, 20 bp, synthetic construct
  misc_feature 1..20: note = Synthetic
  source 1..20: mol_type = other DNA
gtaacggcagacttctccac

SEQ ID NO: 3700 - DNA, 21 bp, synthetic construct
  misc_feature 1..21: note = Synthetic
  source 1..21: mol_type = other DNA
gcatggtgcacctgactcctg

SEQ ID NO: 3701 - DNA, 21 bp, synthetic construct
  misc_feature 1..21: note = Synthetic
  source 1..21: mol_type = other DNA
gcatggtgcacctgactcctg

SEQ ID NO: 3702 - DNA, 21 bp, synthetic construct
  misc_feature 1..21: note = Synthetic
  source 1..21: mol_type = other DNA
gcatggtgcacctgactcctg

SEQ ID NO: 3703 - DNA, 21 bp, synthetic construct
  misc_feature 1..21: note = Synthetic
  source 1..21: mol_type = other DNA
gcatggtgcacctgactcctg

SEQ ID NO: 3704 - DNA, 21 bp, synthetic construct
  misc_feature 1..21: note = Synthetic
  source 1..21: mol_type = other DNA
gcatggtgcacctgactcctg

SEQ ID NO: 3705 - DNA, 21 bp, synthetic construct
  misc_feature 1..21: note = Synthetic
  source 1..21: mol_type = other DNA
gcatggtgcacctgactcctg

SEQ ID NO: 3706 - DNA, 21 bp, synthetic construct
  misc_feature 1..21: note = Synthetic
  source 1..21: mol_type = other DNA
gcatggtgcacctgactcctg

SEQ ID NO: 3707 - DNA, 21 bp, synthetic construct
  misc_feature 1..21: note = Synthetic
  source 1..21: mol_type = other DNA
gcatggtgcacctgactcctg

SEQ ID NO: 3708 - DNA, 21 bp, synthetic construct
  misc_feature 1..21: note = Synthetic
  source 1..21: mol_type = other DNA
gcatggtgcacctgactcctg

SEQ ID NO: 3709 - DNA, 21 bp, synthetic construct
  misc_feature 1..21: note = Synthetic
  source 1..21: mol_type = other DNA
gcatggtgcacctgactcctg

SEQ ID NO: 3710 - DNA, 21 bp, synthetic construct
  misc_feature 1..21: note = Synthetic
  source 1..21: mol_type = other DNA
gcatggtgcacctgactcctg

SEQ ID NO: 3711 - DNA, 21 bp, synthetic construct
  misc_feature 1..21: note = Synthetic
  source 1..21: mol_type = other DNA
gcatggtgcacctgactcctg

SEQ ID NO: 3712 - DNA, 21 bp, synthetic construct
  misc_feature 1..21: note = Synthetic
  source 1..21: mol_type = other DNA
gcatggtgcacctgactcctg

SEQ ID NO: 3713 - DNA, 20 bp, synthetic construct
  misc_feature 1..20: note = Synthetic
  source 1..20: mol_type = other DNA
atccttccagtcagggccat

SEQ ID NO: 3714 - DNA, 20 bp, synthetic construct
  misc_feature 1..20: note = Synthetic
  source 1..20: mol_type = other DNA
atccttccagtcagggccat

SEQ ID NO: 3715 - DNA, 20 bp, synthetic construct
  misc_feature 1..20: note = Synthetic
  source 1..20: mol_type = other DNA
atccttccagtcagggccat

SEQ ID NO: 3716 - DNA, 20 bp, synthetic construct
  misc_feature 1..20: note = Synthetic
  source 1..20: mol_type = other DNA
atccttccagtcagggccat

SEQ ID NO: 3717 - DNA, 20 bp, synthetic construct
  misc_feature 1..20: note = Synthetic
  source 1..20: mol_type = other DNA
atccttccagtcagggccat

SEQ ID NO: 3718 - DNA, 20 bp, synthetic construct
  misc_feature 1..20: note = Synthetic
  source 1..20: mol_type = other DNA
atccttccagtcagggccat

SEQ ID NO: 3719 - DNA, 20 bp, synthetic construct
  misc_feature 1..20: note = Synthetic
  source 1..20: mol_type = other DNA
atccttccagtcagggccat

SEQ ID NO: 3720 - DNA, 20 bp, synthetic construct
  misc_feature 1..20: note = Synthetic
  source 1..20: mol_type = other DNA
atccttccagtcagggccat

SEQ ID NO: 3721 - DNA, 20 bp, synthetic construct
  misc_feature 1..20: note = Synthetic
  source 1..20: mol_type = other DNA
atccttccagtcagggccat

SEQ ID NO: 3722 - DNA, 20 bp, synthetic construct
  misc_feature 1..20: note = Synthetic
  source 1..20: mol_type = other DNA
atccttccagtcagggccat

SEQ ID NO: 3723 - DNA, 20 bp, synthetic construct
  misc_feature 1..20: note = Synthetic
  source 1..20: mol_type = other DNA
atccttccagtcagggccat

SEQ ID NO: 3724 - DNA, 20 bp, synthetic construct
  misc_feature 1..20: note = Synthetic
  source 1..20: mol_type = other DNA
atccttccagtcagggccat

SEQ ID NO: 3725 - DNA, 20 bp, synthetic construct
  misc_feature 1..20: note = Synthetic
  source 1..20: mol_type = other DNA
atccttccagtcagggccat

SEQ ID NO: 3726 - DNA, 20 bp, synthetic construct
  misc_feature 1..20: note = Synthetic
  source 1..20: mol_type = other DNA
atccttccagtcagggccat

SEQ ID NO: 3727 - DNA, 20 bp, synthetic construct
  misc_feature 1..20: note = Synthetic
  source 1..20: mol_type = other DNA
atccttccagtcagggccat

SEQ ID NO: 3728 - DNA, 20 bp, synthetic construct
  misc_feature 1..20: note = Synthetic
  source 1..20: mol_type = other DNA
atccttccagtcagggccat

SEQ ID NO: 3729 - DNA, 20 bp, synthetic construct
  misc_feature 1..20: note = Synthetic
  source 1..20: mol_type = other DNA
atccttccagtcagggccat

SEQ ID NO: 3730 - DNA, 20 bp, synthetic construct
  misc_feature 1..20: note = Synthetic
  source 1..20: mol_type = other DNA
atccttccagtcagggccat

SEQ ID NO: 3731 - DNA, 20 bp, synthetic construct
  misc_feature 1..20: note = Synthetic
  source 1..20: mol_type = other DNA
atccttccagtcagggccat

SEQ ID NO: 3732 - DNA, 20 bp, synthetic construct
  misc_feature 1..20: note = Synthetic
  source 1..20: mol_type = other DNA
atccttccagtcagggccat

SEQ ID NO: 3733 - DNA, 20 bp, synthetic construct
  misc_feature 1..20: note = Synthetic
  source 1..20: mol_type = other DNA
atccttccagtcagggccat

SEQ ID NO: 3734 - DNA, 20 bp, synthetic construct
  misc_feature 1..20: note = Synthetic
  source 1..20: mol_type = other DNA
atccttccagtcagggccat

SEQ ID NO: 3735 - DNA, 20 bp, synthetic construct
  misc_feature 1..20: note = Synthetic
  source 1..20: mol_type = other DNA
atccttccagtcagggccat

SEQ ID NO: 3736 - DNA, 20 bp, synthetic construct
  misc_feature 1..20: note = Synthetic
  source 1..20: mol_type = other DNA
atccttccagtcagggccat

SEQ ID NO: 3737 - DNA, 20 bp, synthetic construct
  misc_feature 1..20: note = Synthetic
  source 1..20: mol_type = other DNA
atccttccagtcagggccat

SEQ ID NO: 3738 - DNA, 20 bp, synthetic construct
  misc_feature 1..20: note = Synthetic
  source 1..20: mol_type = other DNA
atccttccagtcagggccat

SEQ ID NO: 3739 - DNA, 20 bp, synthetic construct
  misc_feature 1..20: note = Synthetic
  source 1..20: mol_type = other DNA
atccttccagtcagggccat

SEQ ID NO: 3740 - DNA, 20 bp, synthetic construct
  misc_feature 1..20: note = Synthetic
  source 1..20: mol_type = other DNA
atccttccagtcagggccat

SEQ ID NO: 3741 - DNA, 20 bp, synthetic construct
  misc_feature 1..20: note = Synthetic
  source 1..20: mol_type = other DNA
atccttccagtcagggccat

SEQ ID NO: 3742 - DNA, 20 bp, synthetic construct
  misc_feature 1..20: note = Synthetic
  source 1..20: mol_type = other DNA
atccttccagtcagggccat

SEQ ID NO: 3743 - DNA, 20 bp, synthetic construct
  misc_feature 1..20: note = Synthetic
  source 1..20: mol_type = other DNA
atccttccagtcagggccat

SEQ ID NO: 3744 - DNA, 20 bp, synthetic construct
  misc_feature 1..20: note = Synthetic
  source 1..20: mol_type = other DNA
atccttccagtcagggccat

SEQ ID NO: 3745 - DNA, 20 bp, synthetic construct
  misc_feature 1..20: note = Synthetic
  source 1..20: mol_type = other DNA
atccttccagtcagggccat

SEQ ID NO: 3746 - DNA, 20 bp, synthetic construct
  misc_feature 1..20: note = Synthetic
  source 1..20: mol_type = other DNA
atccttccagtcagggccat

SEQ ID NO: 3747 - DNA, 20 bp, synthetic construct
  misc_feature 1..20: note = Synthetic
  source 1..20: mol_type = other DNA
atccttccagtcagggccat

SEQ ID NO: 3748 - DNA, 20 bp, synthetic construct
  misc_feature 1..20: note = Synthetic
  source 1..20: mol_type = other DNA
atccttccagtcagggccat

SEQ ID NO: 3749 - DNA, 20 bp, synthetic construct
  misc_feature 1..20: note = Synthetic
  source 1..20: mol_type = other DNA
atccttccagtcagggccat

SEQ ID NO: 3750 - DNA, 20 bp, synthetic construct
  misc_feature 1..20: note = Synthetic
  source 1..20: mol_type = other DNA
atccttccagtcagggccat

SEQ ID NO: 3751 - DNA, 20 bp, synthetic construct
  misc_feature 1..20: note = Synthetic
  source 1..20: mol_type = other DNA
atccttccagtcagggccat

SEQ ID NO: 3752 - DNA, 20 bp, synthetic construct
  misc_feature 1..20: note = Synthetic
  source 1..20: mol_type = other DNA
atccttccagtcagggccat

SEQ ID NO: 3753 - DNA, 20 bp, synthetic construct
  misc_feature 1..20: note = Synthetic
  source 1..20: mol_type = other DNA
atccttccagtcagggccat

SEQ ID NO: 3754 - DNA, 20 bp, synthetic construct
  misc_feature 1..20: note = Synthetic
  source 1..20: mol_type = other DNA
atccttccagtcagggccat

SEQ ID NO: 3755 - DNA, 27 bp, synthetic construct
  misc_feature 1..27: note = Synthetic
  source 1..27: mol_type = other DNA
agacttctcctcaggagtcaggtgcac

SEQ ID NO: 3756 - DNA, 27 bp, synthetic construct
  misc_feature 1..27: note = Synthetic
  source 1..27: mol_type = other DNA
agacttctcttcaggagtcaggtgcac

SEQ ID NO: 3757 - DNA, 34 bp, synthetic construct
  misc_feature 1..34: note = Synthetic
  source 1..34: mol_type = other DNA
taacggcagacttctcctcaggagtcaggtgcac

SEQ ID NO: 3758 - DNA, 32 bp, synthetic construct
  misc_feature 1..32: note = Synthetic
  source 1..32: mol_type = other DNA
acggcagacttctcctcaggagtcaggtgcac

SEQ ID NO: 3759 - DNA, 30 bp, synthetic construct
  misc_feature 1..30: note = Synthetic
  source 1..30: mol_type = other DNA
ggcagacttctcctcaggagtcaggtgcac

SEQ ID NO: 3760 - DNA, 29 bp, synthetic construct
  misc_feature 1..29: note = Synthetic
  source 1..29: mol_type = other DNA
gcagacttctcctcaggagtcaggtgcac

SEQ ID NO: 3761 - DNA, 26 bp, synthetic construct
  misc_feature 1..26: note = Synthetic
  source 1..26: mol_type = other DNA
gacttctcctcaggagtcaggtgcac

SEQ ID NO: 3762 - DNA, 25 bp, synthetic construct
  misc_feature 1..25: note = Synthetic
  source 1..25: mol_type = other DNA
acttctcctcaggagtcaggtgcac

SEQ ID NO: 3763 - DNA, 33 bp, synthetic construct
  misc_feature 1..33: note = Synthetic
  source 1..33: mol_type = other DNA
taacggcagacttctcctcaggagtcaggtgca

SEQ ID NO: 3764 - DNA, 31 bp, synthetic construct
  misc_feature 1..31: note = Synthetic
  source 1..31: mol_type = other DNA
acggcagacttctcctcaggagtcaggtgca

SEQ ID NO: 3765 - DNA, 29 bp, synthetic construct
  misc_feature 1..29: note = Synthetic
  source 1..29: mol_type = other DNA
ggcagacttctcctcaggagtcaggtgca

SEQ ID NO: 3766 - DNA, 28 bp, synthetic construct
  misc_feature 1..28: note = Synthetic
  source 1..28: mol_type = other DNA
gcagacttctcctcaggagtcaggtgca

SEQ ID NO: 3767 - DNA, 25 bp, synthetic construct
  misc_feature 1..25: note = Synthetic
  source 1..25: mol_type = other DNA
gacttctcctcaggagtcaggtgca

SEQ ID NO: 3768 - DNA, 24 bp, synthetic construct
  misc_feature 1..24: note = Synthetic
  source 1..24: mol_type = other DNA
acttctcctcaggagtcaggtgca

SEQ ID NO: 3769 - DNA, 23 bp, synthetic construct
  misc_feature 1..23: note = Synthetic
  source 1..23: mol_type = other DNA
atatcttatggccctgactggaa

SEQ ID NO: 3770 - DNA, 24 bp, synthetic construct
  misc_feature 1..24: note = Synthetic
  source 1..24: mol_type = other DNA
tatatcttatggccctgactggaa

SEQ ID NO: 3771 - DNA, 25 bp, synthetic construct
  misc_feature 1..25: note = Synthetic
  source 1..25: mol_type = other DNA
gtatatcttatggccctgactggaa

SEQ ID NO: 3772 - DNA, 28 bp, synthetic construct
  misc_feature 1..28: note = Synthetic
  source 1..28: mol_type = other DNA
accgtatatcttatggccctgactggaa

SEQ ID NO: 3773 - DNA, 29 bp, synthetic construct
  misc_feature 1..29: note = Synthetic
  source 1..29: mol_type = other DNA
aaccgtatatcttatggccctgactggaa

SEQ ID NO: 3774 - DNA, 30 bp, synthetic construct
  misc_feature 1..30: note = Synthetic
  source 1..30: mol_type = other DNA
gaaccgtatatcttatggccctgactggaa

SEQ ID NO: 3775 - DNA, 31 bp, synthetic construct
  misc_feature 1..31: note = Synthetic
  source 1..31: mol_type = other DNA
tgaaccgtatatcttatggccctgactggaa

SEQ ID NO: 3776 - DNA, 19 bp, synthetic construct
  misc_feature 1..19: note = Synthetic
  source 1..19: mol_type = other DNA
atatcttatggccctgact

SEQ ID NO: 3777 - DNA, 20 bp, synthetic construct
  misc_feature 1..20: note = Synthetic
  source 1..20: mol_type = other DNA
tatatcttatggccctgact

SEQ ID NO: 3778 - DNA, 21 bp, synthetic construct
  misc_feature 1..21: note = Synthetic
  source 1..21: mol_type = other DNA
gtatatcttatggccctgact

SEQ ID NO: 3779 - DNA, 24 bp, synthetic construct
  misc_feature 1..24: note = Synthetic
  source 1..24: mol_type = other DNA
accgtatatcttatggccctgact

SEQ ID NO: 3780 - DNA, 25 bp, synthetic construct
  misc_feature 1..25: note = Synthetic
  source 1..25: mol_type = other DNA
aaccgtatatcttatggccctgact

SEQ ID NO: 3781 - DNA, 26 bp, synthetic construct
  misc_feature 1..26: note = Synthetic
  source 1..26: mol_type = other DNA
gaaccgtatatcttatggccctgact

SEQ ID NO: 3782 - DNA, 27 bp, synthetic construct
  misc_feature 1..27: note = Synthetic
  source 1..27: mol_type = other DNA
tgaaccgtatatcttatggccctgact

SEQ ID NO: 3783 - DNA, 26 bp, synthetic construct
  misc_feature 1..26: note = Synthetic
  source 1..26: mol_type = other DNA
tgaaccgtatatcttatggccctgac

SEQ ID NO: 3784 - DNA, 28 bp, synthetic construct
  misc_feature 1..28: note = Synthetic
  source 1..28: mol_type = other DNA
tgaaccgtatatcttatggccctgactg

SEQ ID NO: 3785 - DNA, 29 bp, synthetic construct
  misc_feature 1..29: note = Synthetic
  source 1..29: mol_type = other DNA
tgaaccgtatatcttatggccctgactgg

SEQ ID NO: 3786 - DNA, 30 bp, synthetic construct
  misc_feature 1..30: note = Synthetic
  source 1..30: mol_type = other DNA
tgaaccgtatatcttatggccctgactgga

SEQ ID NO: 3787 - DNA, 31 bp, synthetic construct; identical to SEQ ID NO: 3775
  misc_feature 1..31: note = Synthetic
  source 1..31: mol_type = other DNA

SEQ ID NO: 3788 - DNA, 32 bp, synthetic construct
  misc_feature 1..32: note = Synthetic
  source 1..32: mol_type = other DNA
tgaaccgtatatcttatggccctgactggaag

SEQ ID NO: 3789 - DNA, 33 bp, synthetic construct
  misc_feature 1..33: note = Synthetic
  source 1..33: mol_type = other DNA
tgaaccgtatatcttatggccctgactggaagg

SEQ ID NO: 3790 - DNA, 30 bp, synthetic construct
  misc_feature 1..30: note = Synthetic
  source 1..30: mol_type = other DNA
acctgaaccgtatatcttatggccctgact

SEQ ID NO: 3791 - DNA, 31 bp, synthetic construct
  misc_feature 1..31: note = Synthetic
  source 1..31: mol_type = other DNA
tacctgaaccgtatatcttatggccctgact

SEQ ID NO: 3792 - DNA, 32 bp, synthetic construct; identical to SEQ ID NO: 3533
  misc_feature 1..32: note = Synthetic
  source 1..32: mol_type = other DNA

SEQ ID NO: 3793 - DNA, 33 bp, synthetic construct
  misc_feature 1..33: note = Synthetic
  source 1..33: mol_type = other DNA
ggtacctgaaccgtatatcttatggccctgact

SEQ ID NO: 3794 - DNA, 34 bp, synthetic construct
  misc_feature 1..34: note = Synthetic
  source 1..34: mol_type = other DNA
tggtacctgaaccgtatatcttatggccctgact

SEQ ID NO: 3795 - DNA, 34 bp, synthetic construct
  misc_feature 1..34: note = Synthetic
  source 1..34: mol_type = other DNA
acctgaaccgtatatcctatggccctgactggaa

SEQ ID NO: 3796 - DNA, 28 bp, synthetic construct
  misc_feature 1..28: note = Synthetic
  source 1..28: mol_type = other DNA
accgtatatcctatggccctgactggaa

SEQ ID NO: 3797 - DNA, 36 bp, synthetic construct
  misc_feature 1..36: note = Synthetic
  source 1..36: mol_type = other DNA
acctgaaccgtatatcctatggccctgactggaagg

SEQ ID NO: 3798 - DNA, 35 bp, synthetic construct
  misc_feature 1..35: note = Synthetic
  source 1..35: mol_type = other DNA
acctgaaccgtatatcctatggccctgactggaag

SEQ ID NO: 3799 - DNA, 33 bp, synthetic construct
  misc_feature 1..33: note = Synthetic
  source 1..33: mol_type = other DNA
acctgaaccgtatatcctatggccctgactgga

SEQ ID NO: 3800 - DNA, 32 bp, synthetic construct
  misc_feature 1..32: note = Synthetic
  source 1..32: mol_type = other DNA
acctgaaccgtatatcctatggccctgactgg

SEQ ID NO: 3801 - DNA, 31 bp, synthetic construct; identical to SEQ ID NO: 3532
  misc_feature 1..31: note = Synthetic
  source 1..31: mol_type = other DNA

SEQ ID NO: 3802 - DNA, 29 bp, synthetic construct
  misc_feature 1..29: note = Synthetic
  source 1..29: mol_type = other DNA
aaccgtatatcctatggccctgactggaa

SEQ ID NO: 3803 - DNA, 31 bp, synthetic construct
  misc_feature 1..31: note = Synthetic
  source 1..31: mol_type = other DNA
tgaaccgtatatcctatggccctgactggaa

SEQ ID NO: 3804 - DNA, 35 bp, synthetic construct
  misc_feature 1..35: note = Synthetic
  source 1..35: mol_type = other DNA
tacctgaaccgtatatcctatggccctgactggaa

SEQ ID NO: 3805 - DNA, 38 bp, synthetic construct
  misc_feature 1..38: note = Synthetic
  source 1..38: mol_type = other DNA
tggtacctgaaccgtatatcctatggccctgactggaa

SEQ ID NO: 3806 - DNA, 36 bp, synthetic construct
  misc_feature 1..36: note = Synthetic
  source 1..36: mol_type = other DNA
gtacctgaaccgtatatcctatggccctgactggaa

SEQ ID NO: 3807 - DNA, 26 bp, synthetic construct
  misc_feature 1..26: note = Synthetic
  source 1..26: mol_type = other DNA
aaccgtatatcctatggccctgactg

SEQ ID NO: 3808 - DNA, 28 bp, synthetic construct
  misc_feature 1..28: note = Synthetic
  source 1..28: mol_type = other DNA
tgaaccgtatatcctatggccctgactg

SEQ ID NO: 3809 - DNA, 32 bp, synthetic construct
  misc_feature 1..32: note = Synthetic
  source 1..32: mol_type = other DNA
tacctgaaccgtatatcctatggccctgactg

SEQ ID NO: 3810 - DNA, 35 bp, synthetic construct
  misc_feature 1..35: note = Synthetic
  source 1..35: mol_type = other DNA
tggtacctgaaccgtatatcctatggccctgactg

SEQ ID NO: 3811 - DNA, 57 bp, synthetic construct
  misc_feature 1..57: note = Synthetic
  misc_feature 34..37: note = n is a, c, g, or t
  source 1..57: mol_type = other DNA
acactctttccctacacgacgctcttccgatctnnnnatgtgggctgcctagaaagg

SEQ ID NO: 3812 - DNA, 49 bp, synthetic construct
  misc_feature 1..49: note = Synthetic
  source 1..49: mol_type = other DNA
tggagttcagacgtgtgctcttccgatctcccagccaaacttgtcaacc

SEQ ID NO: 3813 - DNA, 57 bp, synthetic construct
  misc_feature 1..57: note = Synthetic
  misc_feature 34..37: note = n is a, c, g, or t
  source 1..57: mol_type = other DNA
acactctttccctacacgacgctcttccgatctnnnnacgtctcatatgccccttgg

SEQ ID NO: 3814 - DNA, 51 bp, synthetic construct
  misc_feature 1..51: note = Synthetic
  source 1..51: mol_type = other DNA
tggagttcagacgtgtgctcttccgatctacgtaggaattttggtgggaca

SEQ ID NO: 3815 - DNA, 57 bp, synthetic construct
  misc_feature 1..57: note = Synthetic
  misc_feature 34..37: note = n is a, c, g, or t
  source 1..57: mol_type = other DNA
acactctttccctacacgacgctcttccgatctnnnngaacccaggtagccagagac

SEQ ID NO: 3816 - DNA, 49 bp, synthetic construct
  misc_feature 1..49: note = Synthetic
  source 1..49: mol_type = other DNA
tggagttcagacgtgtgctcttccgatcttcctttcaacccgaacggag

SEQ ID NO: 3817 - DNA, 57 bp, synthetic construct
  misc_feature 1..57: note = Synthetic
  misc_feature 34..37: note = n is a, c, g, or t
  source 1..57: mol_type = other DNA
acactctttccctacacgacgctcttccgatctnnnncagctcagcctgagtgttga

SEQ ID NO: 3818 - DNA, 48 bp, synthetic construct
  misc_feature 1..48: note = Synthetic
  source 1..48: mol_type = other DNA
tggagttcagacgtgtgctcttccgatctctcgtgggtttgtggttgc

SEQ ID NO: 3819 - DNA, 57 bp, synthetic construct
  misc_feature 1..57: note = Synthetic
  misc_feature 34..37: note = n is a, c, g, or t
  source 1..57: mol_type = other DNA
acactctttccctacacgacgctcttccgatctnnnncattgcagagaggcgtatca

SEQ ID NO: 3820 - DNA, 47 bp, synthetic construct
  misc_feature 1..47: note = Synthetic
  source 1..47: mol_type = other DNA
tggagttcagacgtgtgctcttccgatctggggtcccaggtgctgac

SEQ ID NO: 3821 - DNA, 58 bp, synthetic construct
  misc_feature 1..58: note = Synthetic
  misc_feature 34..37: note = n is a, c, g, or t
  source 1..58: mol_type = other DNA
acactctttccctacacgacgctcttccgatctnnnnagggttggccaatctactccc

SEQ ID NO: 3822 - DNA, 51 bp, synthetic construct
  misc_feature 1..51: note = Synthetic
  source 1..51: mol_type = other DNA
tggagttcagacgtgtgctcttccgatctgtcttctctgtctccacatgcc

SEQ ID NO: 3823 - DNA, 57 bp, synthetic construct
  misc_feature 1..57: note = Synthetic
  misc_feature 34..37: note = n is a, c, g, or t
  source 1..57: mol_type = other DNA
acactctttccctacacgacgctcttccgatctnnnngtcagtggaacaagccgagt

SEQ ID NO: 3824 - DNA, 49 bp, synthetic construct
  misc_feature 1..49: note = Synthetic
  source 1..49: mol_type = other DNA
tggagttcagacgtgtgctcttccgatctacttggttggggtaacggtg

SEQ ID NO: 3825 - DNA, 57 bp, synthetic construct
  misc_feature 1..57: note = Synthetic
  misc_feature 34..37: note = n is a, c, g, or t
  source 1..57: mol_type = other DNA
acactctttccctacacgacgctcttccgatctnnnncatacaggtgtggcgagagg

SEQ ID NO: 3826 - DNA, 49 bp, synthetic construct
  misc_feature 1..49: note = Synthetic
  source 1..49: mol_type = other DNA
tggagttcagacgtgtgctcttccgatctccagcctcctttggttagca

SEQ ID NO: 3827 - DNA, 59 bp, synthetic construct
  misc_feature 1..59: note = Synthetic
  misc_feature 34..37: note = n is a, c, g, or t
  source 1..59: mol_type = other DNA
acactctttccctacacgacgctcttccgatctnnnntcacaaacaagacagggaactg

SEQ ID NO: 3828 - DNA, 50 bp, synthetic construct
  misc_feature 1..50: note = Synthetic
  source 1..50: mol_type = other DNA
tggagttcagacgtgtgctcttccgatctagatgtagggctagaggggtg

SEQ ID NO: 3829 - DNA, 59 bp, synthetic construct
  misc_feature 1..59: note = Synthetic
  misc_feature 34..37: note = n is a, c, g, or t
  source 1..59: mol_type = other DNA
acactctttccctacacgacgctcttccgatctnnnnacttggtgccaaattcttctcc

SEQ ID NO: 3830 - DNA, 50 bp, synthetic construct
  misc_feature 1..50: note = Synthetic
  source 1..50: mol_type = other DNA
tggagttcagacgtgtgctcttccgatctaaagagggaatgggctttgga

SEQ ID NO: 3831 - DNA, 58 bp, synthetic construct
  misc_feature 1..58: note = Synthetic
  misc_feature 34..37: note = n is a, c, g, or t
  source 1..58: mol_type = other DNA
acactctttccctacacgacgctcttccgatctnnnncacaacagcttcatgtcagcc

SEQ ID NO: 3832 - DNA, 52 bp, synthetic construct
  misc_feature 1..52: note = Synthetic
  source 1..52: mol_type = other DNA
tggagttcagacgtgtgctcttccgatctacgttaatgtttcctgatggtcc

SEQ ID NO: 3833 - DNA, 57 bp, synthetic construct
  misc_feature 1..57: note = Synthetic
  misc_feature 34..37: note = n is a, c, g, or t
  source 1..57: mol_type = other DNA
acactctttccctacacgacgctcttccgatctnnnntcccctgttgacctggagaa

SEQ ID NO: 3834 - DNA, 49 bp, synthetic construct
  misc_feature 1..49: note = Synthetic
  source 1..49: mol_type = other DNA
tggagttcagacgtgtgctcttccgatctcactgtacttgccctgacca

SEQ ID NO: 3835 - DNA, 57 bp, synthetic construct
  misc_feature 1..57: note = Synthetic
  misc_feature 34..37: note = n is a, c, g, or t
  source 1..57: mol_type = other DNA
acactctttccctacacgacgctcttccgatctnnnnttggtgttgacagggagcaa

SEQ ID NO: 3836 - DNA, 49 bp, synthetic construct
  misc_feature 1..49: note = Synthetic
  source 1..49: mol_type = other DNA
tggagttcagacgtgtgctcttccgatctctgagatgtgggcagaaggg

SEQ ID NO: 3837 - DNA, 57 bp, synthetic construct
  misc_feature 1..57: note = Synthetic
  misc_feature 34..37: note = n is a, c, g, or t
  source 1..57: mol_type = other DNA
acactctttccctacacgacgctcttccgatctnnnntgagagggaacagaagggct

SEQ ID NO: 3838 - DNA, 49 bp, synthetic construct
  misc_feature 1..49: note = Synthetic
  source 1..49: mol_type = other DNA
tggagttcagacgtgtgctcttccgatctgtccaaaggcccaagaacct

SEQ ID NO: 3839 - DNA, 58 bp, synthetic construct
  misc_feature 1..58: note = Synthetic
  misc_feature 34..37: note = n is a, c, g, or t
  source 1..58: mol_type = other DNA
acactctttccctacacgacgctcttccgatctnnnntcctagcactttggaaggtcg

SEQ ID NO: 3840 - DNA, 51 bp, synthetic construct
  misc_feature 1..51: note = Synthetic
  source 1..51: mol_type = other DNA
tggagttcagacgtgtgctcttccgatctgctcatcttaatctgctcagcc

SEQ ID NO: 3841 - DNA, 57 bp, synthetic construct
  misc_feature 1..57: note = Synthetic
  misc_feature 34..37: note = n is a, c, g, or t
  source 1..57: mol_type = other DNA
acactctttccctacacgacgctcttccgatctnnnnggcatggcttctgagactca

SEQ ID NO: 3842 - DNA, 53 bp, synthetic construct
  misc_feature 1..53: note = Synthetic
  source 1..53: mol_type = other DNA
tggagttcagacgtgtgctcttccgatctgtctcccttgcactccctgtcttt

SEQ ID NO: 3843 - DNA, 57 bp, synthetic construct
  misc_feature 1..57: note = Synthetic
  misc_feature 34..37: note = n is a, c, g, or t
  source 1..57: mol_type = other DNA
acactctttccctacacgacgctcttccgatctnnnntttggcaatggaggcattgg

SEQ ID NO: 3844 - DNA, 49 bp, synthetic construct
  misc_feature 1..49: note = Synthetic
  source 1..49: mol_type = other DNA
tggagttcagacgtgtgctcttccgatctgaagaggctgcccatgagag

SEQ ID NO: 3845 - DNA, 57 bp, synthetic construct
  misc_feature 1..57: note = Synthetic
  misc_feature 34..37: note = n is a, c, g, or t
  source 1..57: mol_type = other DNA
acactctttccctacacgacgctcttccgatctnnnnggtctgaggctcgaatcctg

SEQ ID NO: 3846 - DNA, 49 bp, synthetic construct
  misc_feature 1..49: note = Synthetic
  source 1..49: mol_type = other DNA
tggagttcagacgtgtgctcttccgatctctgtggcctccatatccctg

SEQ ID NO: 3847 - DNA, 57 bp, synthetic construct
  misc_feature 1..57: note = Synthetic
  misc_feature 34..37: note = n is a, c, g, or t
  source 1..57: mol_type = other DNA
acactctttccctacacgacgctcttccgatctnnnntttccaccagaactcagccc

SEQ ID NO: 3848 - DNA, 49 bp, synthetic construct
  misc_feature 1..49: note = Synthetic
  source 1..49: mol_type = other DNA
tggagttcagacgtgtgctcttccgatctcctcggttcctccacaacac

SEQ ID NO: 3849 - DNA, 62 bp, synthetic construct
  misc_feature 1..62: note = Synthetic
  misc_feature 34..37: note = n is a, c, g, or t
  source 1..62: mol_type = other DNA
acactctttccctacacgacgctcttccgatctnnnngtggggagatttgcatctgtggagg

SEQ ID NO: 3850 - DNA, 55 bp, synthetic construct
  misc_feature 1..55: note = Synthetic
  source 1..55: mol_type = other DNA
tggagttcagacgtgtgctcttccgatctgcttttataccatcttggggttacag

SEQ ID NO: 3851 - DNA, 61 bp, synthetic construct
  misc_feature 1..61: note = Synthetic
  misc_feature 34..37: note = n is a, c, g, or t
  source 1..61: mol_type = other DNA
acactctttccctacacgacgctcttccgatctnnnncaatgtgcttcaacccatcacggc

SEQ ID NO: 3852 - DNA, 56 bp, synthetic construct
  misc_feature 1..56: note = Synthetic
  source 1..56: mol_type = other DNA
tggagttcagacgtgtgctcttccgatctccatgaatttgtgatggatgcagtctg

SEQ ID NO: 3853 - DNA, 61 bp, synthetic construct
  misc_feature 1..61: note = Synthetic
  misc_feature 34..37: note = n is a, c, g, or t
  source 1..61: mol_type = other DNA
acactctttccctacacgacgctcttccgatctnnnngagaaggaggtgcaggagctagac

SEQ ID NO: 3854 - DNA, 53 bp, synthetic construct
  misc_feature 1..53: note = Synthetic
  source 1..53: mol_type = other DNA
tggagttcagacgtgtgctcttccgatctcatcccgaccttcatccctcctgg

SEQ ID NO: 3855 - DNA, 62 bp, synthetic construct
  misc_feature 1..62: note = Synthetic
  misc_feature 34..37: note = n is a, c, g, or t
  source 1..62: mol_type = other DNA
acactctttccctacacgacgctcttccgatctnnnngtagttctgacattcctcctgaggg

SEQ ID NO: 3856 - DNA, 52 bp, synthetic construct
  misc_feature 1..52: note = Synthetic
  source 1..52: mol_type = other DNA
tggagttcagacgtgtgctcttccgatcttcaaacaaggtgcagatacagca

SEQ ID NO: 3857 - DNA, 59 bp, synthetic construct
  misc_feature 1..59: note = Synthetic
  misc_feature 34..37: note = n is a, c, g, or t
  source 1..59: mol_type = other DNA
acactctttccctacacgacgctcttccgatctnnnngcgggcagtggcgtcttagtcg

SEQ ID NO: 3858 - DNA, 51 bp, synthetic construct
  misc_feature 1..51: note = Synthetic
  source 1..51: mol_type = other DNA
tggagttcagacgtgtgctcttccgatctccctgggtttggttggctgctc

SEQ ID NO: 3859 - DNA, 58 bp, synthetic construct
  misc_feature 1..58: note = Synthetic
  misc_feature 34..37: note = n is a, c, g, or t
  source 1..58: mol_type = other DNA
acactctttccctacacgacgctcttccgatctnnnnctccttgccgcccagccggtc

SEQ ID NO: 3860 - DNA, 52 bp, synthetic construct
  misc_feature 1..52: note = Synthetic
  source 1..52: mol_type = other DNA
tggagttcagacgtgtgctcttccgatctcactggggaagaggcgaggacac

SEQ ID NO: 3861 - DNA, 60 bp, synthetic construct
  misc_feature 1..60: note = Synthetic
  misc_feature 34..37: note = n is a, c, g, or t
  source 1..60: mol_type = other DNA
acactctttccctacacgacgctcttccgatctnnnnccagtgtttcccatccccaacac

SEQ ID NO: 3862 - DNA, 52 bp, synthetic construct
  misc_feature 1..52: note = Synthetic
  source 1..52: mol_type = other DNA
tggagttcagacgtgtgctcttccgatctgaatggatccccccctagagctc

SEQ ID NO: 3863 - DNA, 59 bp, synthetic construct
  misc_feature 1..59: note = Synthetic
  misc_feature 34..37: note = n is a, c, g, or t
  source 1..59: mol_type = other DNA
acactctttccctacacgacgctcttccgatctnnnncaggcccacaggtccttctgga

SEQ ID NO: 3864 - protein, 18 aa, synthetic construct
  REGION 1..18: note = Synthetic
KRTADGSEFESPKKKRKV

SEQ ID NO: 3865 - protein, 236 aa, Homo sapiens
MSEAPRAETFVFLDLEATGLPSVEPEIAELSLFAVHRSSLENPEHDESGALVLPRVLDKLTLCMCPERPFTAKASEITGLSSEGLARCRKAGFDGAVVRTLQAFLSRQAGPICLVAHNGFDYDFPLLCAELRRLGARLPRDTVCLDTLPALRGLDRAHSHGTRARGRQGYSLGSLFHRYFRAEPSAAHSAEGDVHTLLLIFLHRAAELLAWADEQARGWAHIEPMYLPPDDPSLEA

SEQ ID NO: 3866 - protein, 236 aa, Mus musculus
MSEPPRAETFVFLDLEATGLPNMDPEIAEISLFAVHRSSLENPERDDSGSLVLPRVLDKLTLCMCPERPFTAKASEITGLSSESLMHCGKAGFNGAVVRTLQGFLSRQEGPICLVAHNGFDYDFPLLCTELQRLGAHLPQDTVCLDTLPALRGLDRAHSHGTRAQGRKSYSLASLFHRYFQAEPSAAHSAEGDVHTLLLIFLHRAPELLAWADEQARSWAHIEPMYVPPDGPSLEA

SEQ ID NO: 3867 - protein, 236 aa, Rattus norvegicus
MSEPLRAETFVFLDLEATGLPNMDPEIAEISLFAVHRSSLENPERDDSGSLVLPRVLDKLTLCMCPERPFTAKASEITGLSSEGLMNCRKAAFNDAVVRTLQGFLSRQEGPICLVAHNGFDYDFPLLCTELQRLGAHLPRDTVCLDTLPALRGLDRVHSHGTRAQGRKSYSLASLFHRYFQAEPSAAHSAEGDVNTLLLIFLHRAPELLAWADEQARSWAHIEPMYVPPDGPSLEA

SEQ ID NO: 3868 - protein, 803 aa, Homo sapiens
MGIQGLLQFIKEASEPIHVRKYKGQVVAVDTYCWLHKGAIACAEKLAKGEPTDRYVGFCMKFVNMLLSHGIKPILVFDGCTLPSKKEVERSRRERRQANLLKGKQLLREGKVSEARECFTRSINITHAMAHKVIKAARSQGVDCLVAPYEADAQLAYLNKAGIVQAIITEDSDLLAFGCKKVILKMDQFGNGLEIDQARLGMCRQLGDVFTEEKFRYMCILSGCDYLSSLRGIGLAKACKVLRLANNPDIVKVIKKIGHYLKMNITVPEDYINGFIRANNTFLYQLVFDPIKRKLIPLNAYEDDVDPETLSYAGQYVDDSIALQIALGNKDINTFEQIDDYNPDTAMPAHSRSHSWDDKTCQKSANVSSIWHRNYSPRPESGTVSDAPQLKENPSTVGVERVISTKGLNLPRKSSIVKRPRSAELSEDDLLSQYSLSFTKKTKKNSSEGNKSLSFSEVFVPDLVNGPTNKKSVSTPPRTRNKFATFLQRKNEESGAVVVPGTRSRFFCSSDSTDCVSNKVSIQPLDETAVTDKENNLHESEYGDQEGKRLVDTDVARNSSDDIPNNHIPGDHIPDKATVFTDEESYSFESSKFTRTISPPTLGTLRSCFSWSGGLGDFSRTPSPSPSTALQQFRRKSDSPTSLPENNMSDVSQLKSEESSDDESHPLREEACSSQSQESGEFSLQSSNASKLSQCSSKDSDSEESDCNIKLLDSQSDQTSKLRLSHFSKKDTPLRNKVPGLYKSSSADSLSTTKIKPLGPARASGLSKKPASIQKRKHHNAENKPGLQIKLNELWKNFGFKKF

SEQ ID NO: 3869 - protein, 846 aa, Homo sapiens
MGIQGLLQFIKEASEPIHVRKYKGQVVAVDTYCWLHKGAIACAEKLAKGEPTDRYVGFCMKFVNMLLSHGIKPILVFDGCTLPSKKEVERSRRERRQANLLKGKQLLREGKVSEARECFTRSINITHAMAHKVIKAARSQGVDCLVAPYEADAQLAYLNKAGIVQAIITEDSDLLAFGCKKVILKMDQFGNGLEIDQARLGMCRQLGDVFTEEKFRYMCILSGCDYLSSLRGIGLAKACKVLRLANNPDIVKVIKKIGHYLKMNITVPEDYINGFIRANNTFLYQLVFDPIKRKLIPLNAYEDDVDPETLSYAGQYVDDSIALQIALGNKDINTFEQIDDYNPDTAMPAHSRSHSWDDKTCQKSANVSSIWHRNYSPRPESGTVSDAPQLKENPSTVGVERVISTKGLNLPRKSSIVKRPRSAELSEDDLLSQYSLSFTKKTKKNSSEGNKSLSFSEVFVPDLVNGPTNKKSVSTPPRTRNKFATFLQRKNEESGAVVVPGTRSRFFCSSDSTDCVSNKVSIQPLDETAVTDKENNLHESEYGDQEGKRLVDTDVARNSSDDIPNNHIPGDHIPDKATVFTDEESYSFESSKFTRTISPPTLGTLRSCFSWSGGLGDFSRTPSPSPSTALQQFRRKSDSPTSLPENNMSDVSQLKSEESSDDESHPLREEACSSQSQESGEFSLQSSNASKLSQCSSKDSDSEESDCNIKLLDSQSDQTSKLRLSHFSKKDTPLRNKVPGLYKSSSADSLSTTKIKPLGPARASGLSKKPASIQKRKHHNAENKPGLQIKLNELWKNFGFKKDSEKLPPCKKPLSPVRDNIQLTPEAEEDIFNKPECGRVQRAIFQ

SEQ ID NO: 3870 - protein, 845 aa, Homo sapiens
MGIQGLLQFIKEASEPIHVRKYKGQVVAVDTYCWLHKGAIACAEKLAKGEPTDRYVGFCMKFVNMLLSHGIKPILVFDGCTLPSKKEVERSRRERRQANLLKGKQLLREGKVSEARECFTRSINITHAMAHKVIKAARSQGVDCLVAPYEADAQLAYLNKAGIVQAIITEDSDLLAFGCKKVILKMDQFGNGLEIDQARLGMCRQLGDVFTEEKFRYMCILSGCDYLSSLRGIGLAKACKVLRLANNPDIVKVIKKIGHYLKMNITVPEDYINGFIRANNTFLYQLVFDPIKRKLIPLNAYEDDVDPETLSYAGQYVDDSIALQIALGNKDINTFEQIDDYNPDTAMPAHSRSHSWDDKTCQKSANVSSIWHRNYSPRPESGTVSDAPQLKENPSTVGVERVISTKGLNLPRKSSIVKRPRSELSEDDLLSQYSLSFTKKTKKNSSEGNKSLSFSEVFVPDLVNGPTNKKSVSTPPRTRNKFATFLQRKNEESGAVVVPGTRSRFFCSSDSTDCVSNKVSIQPLDETAVTDKENNLHESEYGDQEGKRLVDTDVARNSSDDIPNNHIPGDHIPDKATVFTDEESYSFESSKFTRTISPPTLGTLRSCFSWSGGLGDFSRTPSPSPSTALQQFRRKSDSPTSLPENNMSDVSQLKSEESSDDESHPLREEACSSQSQESGEFSLQSSNASKLSQCSSKDSDSEESDCNIKLLDSQSDQTSKLRLSHFSKKDTPLRNKVPGLYKSSSADSLSTTKIKPLGPARASGLSKKPASIQKRKHHNAENKPGLQIKLNELWKNFGFKKDSEKLPPCKKPLSPVRDNIQLTPEAEEDIFNKPECGRVQRAIFQ

SEQ ID NO: 3871 - protein, 580 aa, Homo sapiens
MGTTGLESLSLGDRGAAPTVTSSERLVPDPPNDLRKEDVAMELERVGEDEEQMMIKRSSECNPLLQEPIASAQFGATAGTECRKSVPCGWERVVKQRLFGKTAGRFDVYFISPQGLKFRSKSSLANYLHKNGETSLKPEDFDFTVLSKRGIKSRYKDCSMAALTSHLQNQSNNSNWNLRTRSKCKKDVFMPPSSSSELQESRGLSNFTSTHLLLKEDEGVDDVNFRKVRKPKGKVTILKGIPIKKTKKGCRKSCSGFVQSDSKRESVCNKADAESEPVAQKSQLDRTVCISDAGACGETLSVTSEENSLVKKKERSLSSGSNFCSEQKTSGIINKFCSAKDSEHNEKYEDTFLESEEIGTKVEVVERKEHLHTDILKRGSEMDNNCSPTRKDFTGEKIFQEDTIPRTQIERRKTSLYFSSKYNKEALSPPRRKAFKKWTPPRSPFNLVQETLFHDPWKLLIATIFLNRTSGKMAIPVLWKFLEKYPSAEVARTADWRDVSELLKPLGLYDLRAKTIVKFSDEYLTKQWKYPIELHGIGKYGNDSYRIFCVNEWKQVHPEDHKLNKYHDWLWENHEKLSLS

SEQ ID NO: 3872 - protein, 410 aa, Homo sapiens
MEAENAGSYSLQQAQAFYTFPFQQLMAEAPNMAVVNEQQMPEEVPAPAPAQEPVQEAPKGRKRKPRTTEPKQPVEPKKPVESKKSGKSAKSKEKQEKITDTFKVKRKVDRFNGVSEAELLTKTLPDILTFNLDIVIIGINPGLMAAYKGHHYPGPGNHFWKCLFMSGLSEVQLNHMDDHTLPGKYGIGFTNMVERTTPGSKDLSSKEFREGGRILVQKLQKYQPRIAVFNGKCIYEIFSKEVFGVKVKNLEFGLQPHKIPDTETLCYVMPSSSARCAQFPRAQDKVHYYIKLKDLRDQLKGIERNMDVQEVQYTFDLQLAQEDAKKMAVKEEKYDPGYEAAYGGAYGENPCSSEPCGFSSNGLIESVELRGESAFSGIPNGQWMTQSFTDQIPSFSNHCGTQEQEEESHA

SEQ ID NO: 3873 - protein, 84 aa, synthetic construct
  REGION 1..84: note = Synthetic
MTNLSDIIEKETGKQLVIQESILMLPEEVEEVIGNKPESDILVHTAYDESTDENVMLLTSDAPEYKPWALVIQDSNGENKIKML

SEQ ID NO: 3874 - RNA, 128 nt, synthetic construct
  misc_feature 1..128: note = Synthetic
  misc_feature 20..21: note = scaffold may be inserted between bases
  misc_feature 96..97: note = template and PBS may be inserted between bases
  misc_feature 122..123: note = terminal motif may be inserted between bases
  source 1..128: mol_type = other RNA
ggcccagactgagcacgtgagttttagagctagaaatagcaagttaaaataaggctagtccgttatcaacttgaaaaagtggcaccgagtcggtgctctgccatcaaagcgtgctcagtctgtttttt

SEQ ID NO: 3875 - protein, 1165 aa, synthetic construct
  REGION 1..1165: note = Synthetic
MKRTADGSEFESPKKKRKVDKKYSIGLDIGTNSVGWAVITDEYKVPSKKFKVLGNTDRHSIKKNLIGALLFDSGETAEATRLKRTARRRYTRRKNRICYLQEIFSNEMAKVDDSFFHRLEESFLVEEDKKHERHPIFGNIVDEVAYHEKYPTIYHLRKKLVDSTDKADLRLIYLALAHMIKFRGHFLIEGDLNPDNSDVDKLFIQLVQTYNQLFEENPINASGVDAKAILSARLSKSRRLENLIAQLPGEKKNGLFGNLIALSLGLTPNFKSNFDLAEDAKLQLSKDTYDDDLDNLLAQIGDQYADLFLAAKNLSDAILLSDILRVNTEITKAPLSASMIKRYDEHHQDLTLLKALVRQQLPEKYKEIFFDQSKNGYAGYIDGGASQEEFYKFIKPILEKMDGTEELLVKLNREDLLRKQRTFDNGSIPHQIHLGELHAILRRQEDFYPFLKDNREKIEKILTFRIPYYVGPLARGNSRFAWMTRKSEETITPWNFEEVVDKGASAQSFIERMTNFDKNLPNEKVLPKHSLLYEYFTVYNELTKVKYVTEGMRKPAFLSGEQKKAIVDLLFKTNRKVTVKQLKEDYFKKIECFDSVEISGVEDRFNASLGTYHDLLKIIKDKDFLDNEENEDILEDIVLTLTLFEDREMIEERLKTYAHLFDDKVMKQLKRRRYTGWGRLSRKLINGIRDKQSGKTILDFLKSDGFANRNFMQLIHDDSLTFKEDIQKAQVSGQGDSLHEHIANLAGSPAIKKGILQTVKVVDELVKVMGRHKPENIVIEMARENQTTQKGQKNSRERMKRIEEGIKELGSQILKEHPVENTQLQNEKLYLYYLQNGRDMYVDQELDINRLSDYDVDAIVPQSFLKDDSIDNKVLTRSDKNRGKSDNVPSEEVVKKMKNYWRQLLNAKLITQRKFDNLTKAERGGLSELDKAGFIKRQLVETRQITKHVAQILDSRMNTKYDENDKLIREVKVITLKSKLVSDFRKDFQFYKVREINNYHHAHDAYLNAVVGTALIKKYPKLESEFVYGDYKVYDVRKMIAKCLSYETEILTVEYGLLPIGKIVEKRIECTVYSVDNNGNIYTQPVAQWHDRGEQEVFEYCLEDGSLIRATKDHKFMTVDGQMLPIDEIFERELDLMRVDNLPNSGGSKRTADGSEFEPKKKRKV

SEQ ID NO: 3876 - protein, 1128 aa, synthetic construct
  REGION 1..1128: note = Synthetic
MKRTADGSEFESPKKKRKVIKIATRKYLGKQNVYDIGVERDHNFALKNGFIASNCFNEIGKATAKYFFYSNIMNFFKTEITLANGEIRKRPLIETNGETGEIVWDKGRDFATVRKVLSMPQVNIVKKTEVQTGGFSKESILPKRNSDKLIARKKDWDPKKYGGFDSPTVAYSVLVVAKVEKGKSKKLKSVKELLGITIMERSSFEKNPIDFLEAKGYKEVKKDLIIKLPKYSLFELENGRKRMLASAGELQKGNELALPSKYVNFLYLASHYEKLKGSPEDNEQKQLFVEQHKHYLDEIIEQISEFSKRVILADANLDKVLSAYNKHRDKPIREQAENIIHLFTLTNLGAPAAFKYFDTTIDRKRYTSTKEVLDATLIHQSITGLYETRIDLSQLGGDSGGSSGGSSGSETPGTSESATPESSGGSSGGSSTLNIEDEYRLHETSKEPDVSLGSTWLSDFPQAWAETGGMGLAVRQAPLIIPLKATSTPVSIKQYPMSQEARLGIKPHIQRLLDQGILVPCQSPWNTPLLPVKKPGTNDYRPVQDLREVNKRVEDIHPTVPNPYNLLSGLPPSHQWYTVLDLKDAFFCLRLHPTSQPLFAFEWRDPEMGISGQLTWTRLPQGFKNSPTLFNEALHRDLADFRIQHPDLILLQYVDDLLLAATSELDCQQGTRALLQTLGNLGYRASAKKAQICQKQVKYLGYLLKEGQRWLTEARKETVMGQPTPKTPRQLREFLGKAGFCRLFIPGFAEMAAPLYPLTKPGTLFNWGPDQQKAYQEIKQALLTAPALGLPDLTKPFELFVDEKQGYAKGVLTQKLGPWRRPVAYLSKKLDPVAAGWPPCLRMVAAIAVLTKDAGKLTMGQPLVILAPHAVEALVKQPPDRWLSNARMTHYQALLLDTDRVQFGPVVALNPATLLPLPEEGLQHNCLDILAEAHGTRPDLTDQPLPDADHTWYTDGSSLLQEGQRKAGAAVTTETEVIWAKALPAGTSAQRAELIALTQALKMAEGKKLNVYTDSRYAFATAHIHGEIYRRRGWLTSEGKEIKNKDEILALLKALFLPKRLSIIHCPGHQKGHSAEARGNRMADQAARKAAITETPDTSTLLIENSSPSGGSKRTADGSEFEPKKKRK

SEQ ID NO: 3877 - protein, 1024 aa, Streptococcus pyogenes
MDKKYSIGLDIGTNSVGWAVITDEYKVPSKKFKVLGNTDRHSIKKNLIGALLFDSGETAEATRLKRTARRRYTRRKNRICYLQEIFSNEMAKVDDSFFHRLEESFLVEEDKKHERHPIFGNIVDEVAYHEKYPTIYHLRKKLVDSTDKADLRLIYLALAHMIKFRGHFLIEGDLNPDNSDVDKLFIQLVQTYNQLFEENPINASGVDAKAILSARLSKSRRLENLIAQLPGEKKNGLFGNLIALSLGLTPNFKSNFDLAEDAKLQLSKDTYDDDLDNLLAQIGDQYADLFLAAKNLSDAILLSDILRVNTEITKAPLSASMIKRYDEHHQDLTLLKALVRQQLPEKYKEIFFDQSKNGYAGYIDGGASQEEFYKFIKPILEKMDGTEELLVKLNREDLLRKQRTFDNGSIPHQIHLGELHAILRRQEDFYPFLKDNREKIEKILTFRIPYYVGPLARGNSRFAWMTRKSEETITPWNFEEVVDKGASAQSFIERMTNFDKNLPNEKVLPKHSLLYEYFTVYNELTKVKYVTEGMRKPAFLSGEQKKAIVDLLFKTNRKVTVKQLKEDYFKKIECFDSVEISGVEDRFNASLGTYHDLLKIIKDKDFLDNEENEDILEDIVLTLTLFEDREMIEERLKTYAHLFDDKVMKQLKRRRYTGWGRLSRKLINGIRDKQSGKTILDFLKSDGFANRNFMQLIHDDSLTFKEDIQKAQVSGQGDSLHEHIANLAGSPAIKKGILQTVKVVDELVKVMGRHKPENIVIEMARENQTTQKGQKNSRERMKRIEEGIKELGSQILKEHPVENTQLQNEKLYLYYLQNGRDMYVDQELDINRLSDYDVDAIVPQSFLKDDSIDNKVLTRSDKNRGKSDNVPSEEVVKKMKNYWRQLLNAKLITQRKFDNLTKAERGGLSELDKAGFIKRQLVETRQITKHVAQILDSRMNTKYDENDKLIREVKVITLKSKLVSDFRKDFQFYKVREINNYHHAHDAYLNAVVGTALIKKYPKLESEFVYGDYKVYDVRKMIAK

SEQ ID NO: 3878 - protein, 1023 aa, Streptococcus pyogenes
DKKYSIGLDIGTNSVGWAVITDEYKVPSKKFKVLGNTDRHSIKKNLIGALLFDSGETAEATRLKRTARRRYTRRKNRICYLQEIFSNEMAKVDDSFFHRLEESFLVEEDKKHERHPIFGNIVDEVAYHEKYPTIYHLRKKLVDSTDKADLRLIYLALAHMIKFRGHFLIEGDLNPDNSDVDKLFIQLVQTYNQLFEENPINASGVDAKAILSARLSKSRRLENLIAQLPGEKKNGLFGNLIALSLGLTPNFKSNFDLAEDAKLQLSKDTYDDDLDNLLAQIGDQYADLFLAAKNLSDAILLSDILRVNTEITKAPLSASMIKRYDEHHQDLTLLKALVRQQLPEKYKEIFFDQSKNGYAGYIDGGASQEEFYKFIKPILEKMDGTEELLVKLNREDLLRKQRTFDNGSIPHQIHLGELHAILRRQEDFYPFLKDNREKIEKILTFRIPYYVGPLARGNSRFAWMTRKSEETITPWNFEEVVDKGASAQSFIERMTNFDKNLPNEKVLPKHSLLYEYFTVYNELTKVKYVTEGMRKPAFLSGEQKKAIVDLLFKTNRKVTVKQLKEDYFKKIECFDSVEISGVEDRFNASLGTYHDLLKIIKDKDFLDNEENEDILEDIVLTLTLFEDREMIEERLKTYAHLFDDKVMKQLKRRRYTGWGRLSRKLINGIRDKQSGKTILDFLKSDGFANRNFMQLIHDDSLTFKEDIQKAQVSGQGDSLHEHIANLAGSPAIKKGILQTVKVVDELVKVMGRHKPENIVIEMARENQTTQKGQKNSRERMKRIEEGIKELGSQILKEHPVENTQLQNEKLYLYYLQNGRDMYVDQELDINRLSDYDVDAIVPQSFLKDDSIDNKVLTRSDKNRGKSDNVPSEEVVKKMKNYWRQLLNAKLITQRKFDNLTKAERGGLSELDKAGFIKRQLVETRQITKHVAQILDSRMNTKYDENDKLIREVKVITLKSKLVSDFRKDFQFYKVREINNYHHAHDAYLNAVVGTALIKKYPKLESEFVYGDYKVYDVRKMIAK

SEQ ID NO: 3879 - protein, 344 aa, Streptococcus pyogenes
SEQEIGKATAKYFFYSNIMNFFKTEITLANGEIRKRPLIETNGETGEIVWDKGRDFATVRKVLSMPQVNIVKKTEVQTGGFSKESILPKRNSDKLIARKKDWDPKKYGGFDSPTVAYSVLVVAKVEKGKSKKLKSVKELLGITIMERSSFEKNPIDFLEAKGYKEVKKDLIIKLPKYSLFELENGRKRMLASAGELQKGNELALPSKYVNFLYLASHYEKLKGSPEDNEQKQLFVEQHKHYLDEIIEQISEFSKRVILADANLDKVLSAYNKHRDKPIREQAENIIHLFTLTNLGAPAAFKYFDTTIDRKRYTSTKEVLDATLIHQSITGLYETRIDLSQLGGD

SEQ ID NO: 3880 - DNA, 12 bp, synthetic construct
  misc_feature 1..12: note = Synthetic
  source 1..12: mol_type = other DNA
tccggaggatct

SEQ ID NO: 3881 - DNA, 24 bp, synthetic construct
  misc_feature 1..24: note = Synthetic
  source 1..24: mol_type = other DNA
tccggaggatctagcggaggctcc

SEQ ID NO: 3882 - DNA, 36 bp, synthetic construct
  misc_feature 1..36: note = Synthetic
  source 1..36: mol_type = other DNA
tccggaggatctagcggaggctccagcggaggcagc

SEQ ID NO: 3883 - DNA, 48 bp, synthetic construct
  misc_feature 1..48: note = Synthetic
  source 1..48: mol_type = other DNA
tctggctctgagacacctggcacaagcgagagcgcaacacctgaaagc

SEQ ID NO: 3884 - DNA, 15 bp, synthetic construct
  misc_feature 1..15: note = Synthetic
  source 1..15: mol_type = other DNA
gaagcagctgctaaa

SEQ ID NO: 3885 - DNA, 30 bp, synthetic construct
  misc_feature 1..30: note = Synthetic
  source 1..30: mol_type = other DNA
gaagccgctgctaaagaagctgcagctaag

SEQ ID NO: 3886 - DNA, 45 bp, synthetic construct
  misc_feature 1..45: note = Synthetic
  source 1..45: mol_type = other DNA
gaagccgctgctaaagaggccgctgctaaagaagctgcagctaag

SEQ ID NO: 3887-3888 - skipped (2 entries)

SEQ ID NO: 3889 - protein, 12 aa, synthetic construct
  REGION 1..12: note = Synthetic
SGGSSGGSSGGS

SEQ ID NO: 3890 - RNA, 133 nt, synthetic construct
  misc_feature 1..133: note = Synthetic
  misc_feature 20..21: note = scaffold may be inserted between bases
  misc_feature 96..97: note = template and PBS may be inserted between bases
  misc_feature 129..130: note = terminal motif may be inserted between bases
  source 1..133: mol_type = other RNA
ggcccagactgagcacgtgagttttagagctagaaatagcaagttaaaataaggctagtccgttatcaacttgaaaaagtggcaccgagtcggtgctctgccatcaaagcttcgaccgtgctcagtctgtttt

SEQ ID NO: 3891 - RNA, 134 nt, synthetic construct
  misc_feature 1..134: note = Synthetic
  misc_feature 20..21: note = scaffold may be inserted between bases
  misc_feature 96..97: note = template and PBS may be inserted between bases
  misc_feature 130..131: note = terminal motif may be inserted between bases
  source 1..134: mol_type = other RNA
ggcccagactgagcacgtgagttttagagctagaaatagcaagttaaaataaggctagtccgttatcaacttgaaaaagtggcaccgagtcggtgctctgccatcaggcgaaagcctcgtgctcagtctgtttt

SEQ ID NO: 3892 - RNA, 133 nt, synthetic construct
  misc_feature 1..133: note = Synthetic
  misc_feature 20..21: note = scaffold may be inserted between bases
  misc_feature 96..97: note = template and PBS may be inserted between bases
  misc_feature 129..130: note = terminal motif may be inserted between bases
  source 1..133: mol_type = other RNA
ggcccagactgagcacgtgagttttagagctagaaatagcaagttaaaataaggctagtccgttatcaacttgaaaaagtggcaccgagtcggtgctctgccatcaggcgaaagcccgtgctcagtctgtttt

SEQ ID NO: 3893 - RNA, 138 nt, synthetic construct
  misc_feature 1..138: note = Synthetic
  misc_feature 20..21: note = scaffold may be inserted between bases
  misc_feature 96..97: note = template and PBS may be inserted between bases
  misc_feature 134..135: note = terminal motif may be inserted between bases
  source 1..138: mol_type = other RNA
ggcccagactgagcacgtgagttttagagctagaaatagcaagttaaaataaggctagtccgttatcaacttgaaaaagtggcaccgagtcggtgctctgccatcagatgcgaaagcatctcgtgctcagtctgtttt

SEQ ID NO: 3894 - RNA, 138 nt, synthetic construct
  misc_feature 1..138: note = Synthetic
  misc_feature 20..21: note = scaffold may be inserted between bases
  misc_feature 96..97: note = template and PBS may be inserted between bases
  misc_feature 134..135: note = terminal motif may be inserted between bases
  source 1..138: mol_type = other RNA
ggcccagactgagcacgtgagttttagagctagaaatagcaagttaaaataaggctagtccgttatcaacttgaaaaagtggcaccgagtcggtgctctgccatcagatgcgaaagcacctcgtgctcagtctgtttt

SEQ ID NO: 3895 - RNA, 137 nt, synthetic construct
  misc_feature 1..137: note = Synthetic
  misc_feature 20..21: note = scaffold may be inserted between bases
  misc_feature 96..97: note = template and PBS may be inserted between bases
  misc_feature 133..134: note = terminal motif may be inserted between bases
  source 1..137: mol_type = other RNA
ggcccagactgagcacgtgagttttagagctagaaatagcaagttaaaataaggctagtccgttatcaacttgaaaaagtggcaccgagtcggtgctctgccatcagatgcgaaagcatccgtgctcagtctgtttt

SEQ ID NO: 3896 - RNA, 142 nt, synthetic construct
  misc_feature 1..142: note = Synthetic
  misc_feature 20..21: note = scaffold may be inserted between bases
  misc_feature 96..97: note = template and PBS may be inserted between bases
  misc_feature 138..139: note = terminal motif may be inserted between bases
  source 1..142: mol_type = other RNA
ggcccagactgagcacgtgagttttagagctagaaatagcaagttaaaataaggctagtccgttatcaacttgaaaaagtggcaccgagtcggtgctctgccatcagacatgcgaaagcatgtctcgtgctcagtctgtttt

SEQ ID NO: 3897 - RNA, 141 nt, synthetic construct
  misc_feature 1..141: note = Synthetic
  misc_feature 20..21: note = scaffold may be inserted between bases
  misc_feature 96..97: note = template and PBS may be inserted between bases
  misc_feature 137..138: note = terminal motif may be inserted between bases
  source 1..141: mol_type = other RNA
ggcccagactgagcacgtgagttttagagctagaaatagcaagttaaaataaggctagtccgttatcaacttgaaaaagtggcaccgagtcggtgctctgccatcagacatgcgaaagcaggcccgtgctcagtctgtttt

SEQ ID NO: 3898 - RNA, 142 nt, synthetic construct; identical to SEQ ID NO: 3896
  misc_feature 1..142: note = Synthetic
  misc_feature 20..21: note = scaffold may be inserted between bases
  misc_feature 96..97: note = template and PBS may be inserted between bases
  misc_feature 138..139: note = terminal motif may be inserted between bases
  source 1..142: mol_type = other RNA

SEQ ID NO: 3899 - RNA, 133 nt, synthetic construct
  misc_feature 1..133: note = Synthetic
  misc_feature 20..21: note = scaffold may be inserted between bases
  misc_feature 96..97: note = template and PBS may be inserted between bases
  misc_feature 129..130: note = terminal motif may be inserted between bases
  source 1..133: mol_type = other RNA
ggcccagactgagcacgtgagttttagagctatacgtagcaagttaaaataaggctagtccgttatcaactttacgaagtgggaccgagtcggtcctctgccatcaaagcttcgaccgtgctcagtctgtttt

SEQ ID NO: 3900 - RNA, 128 nt, synthetic construct
  misc_feature 1..128: note = Synthetic
  misc_feature 28..29: note = spacer may be inserted between bases
  misc_feature 48..49: note = scaffold may be inserted between bases
  misc_feature 124..125: note = terminal motif, template and PBS may be inserted between bases
  source 1..128: mol_type = other RNA
gcagacctaagtggtgacatatggtctgggcccagactgagcacgtgagttttagagctatacgtagcaagttaaaataaggctagtccgttatcaactttacgaagtgggaccgagtcggtcctttt

SEQ ID NO: 3901 - RNA, 128 nt, synthetic construct; identical to SEQ ID NO: 3900
  misc_feature 1..128: note = Synthetic
  misc_feature 28..29: note = spacer may be inserted between bases
  misc_feature 48..49: note = scaffold may be inserted between bases
  misc_feature 124..125: note = terminal motif, template and PBS may be inserted between bases
  source 1..128: mol_type = other RNA

SEQ ID NO: 3902 - RNA, 255 nt, synthetic construct
  misc_feature 1..255: note = Synthetic
  source 1..255: mol_type = other RNA
ggcccagactgagcacgtgagttttagagctagaaatagcaagttaaaataaggctagtccgttatcaacttgaaaaagtggcaccgagtcggtgctggaggaagcagggcttcctttcctctgccatcacttatcgtcgtcatccttgtaatccgtgctcagtctgtctggcggggctcgttggtctaggggtatgattctcgcttcgggtgcgagaggtcccgggttcaaatcccggacgagccccgcctttt

SEQ ID NO: 3903 - RNA, 214 nt, synthetic construct
  misc_feature 1..214: note = Synthetic
  source 1..214: mol_type = other RNA
ggaatcccttctgcagcaccgttttagagctagaaatagcaagttaaaataaggctagtccgttatcaacttgaaaaagtggcaccgagtcggtgcggaaaagcgatcaaggtgctgcagaagggatctggcggggctcgttggtctaggggtatgattctcgcttcgggtgcgagaggtcccgggttcaaatcccggacgagccccgcctttt

SEQ ID NO: 3904 - RNA, 228 nt, synthetic construct
  misc_feature 1..228: note = Synthetic
  source 1..228: mol_type = other RNA
ggcccagactgagcacgtgagttttagagctagaaatagcaagttaaaataaggctagtccgttatcaacttgaaaaagtgggaccgagtcggtcctctgccatcaaagcttcgaccgtgctcagtcttctgctcgaggcggggctcgttggtctaggggtatgattctcgcttcgggtgcgagaggtcccgggttcaaatcccggacgagccccgcctcgagctttt

SEQ ID NO: 3905 - RNA, 188 nt, synthetic construct
  misc_feature 1..188: note = Synthetic
  misc_feature 126..127: note = partial CGG tRNA linker 8 may be inserted between bases
  source 1..188: mol_type = other RNA
ggaatcccttctgcagcaccgttttagagctagaaatagcaagttaaaataaggctagtccgttatcaacttgaaaaagtggcaccgagtcggtgcggaaaagcgatcaaggtgctgcagaagggatctctctctggtctaggggtatgattctcgcttcgggtgcgagaggtcccgggttcaatttt

SEQ ID NO: 3906 - RNA, 214 nt, synthetic construct
  misc_feature 1..214: note = Synthetic
  misc_feature 126..127: note = UGG P1 ext 5 linker 3 may be inserted between bases
  source 1..214: mol_type = other RNA
ggaatcccttctgcagcaccgttttagagctagaaatagcaagttaaaataaggctagtccgttatcaacttgaaaaagtggcaccgagtcggtgcggaaaagcgatcaaggtgctgcagaagggatctggcggggctcgttggtctaggggtatgattctcgctttgggtgcgagaggtcccgggttcaaatcccggacgagccccgcctttt

SEQ ID NO: 3907 - RNA, 219 nt, synthetic construct
  misc_feature 1..219: note = Synthetic
  misc_feature 126..127: note = UGG P1 ext 5 linker 8 may be inserted between bases
  source 1..219: mol_type = other RNA
ggaatcccttctgcagcaccgttttagagctagaaatagcaagttaaaataaggctagtccgttatcaacttgaaaaagtggcaccgagtcggtgcggaaaagcgatcaaggtgctgcagaagggatctctctcggcggggctcgttggtctaggggtatgattctcgctttgggtgcgagaggtcccgggttcaaatcccggacgagccccgcctttt

SEQ ID NO: 3908 - RNA, 220 nt, synthetic construct
  misc_feature 1..220: note = Synthetic
  misc_feature 126..127: note = UGG P1 ext 8 linker 3 may be inserted between bases
  source 1..220: mol_type = other RNA
ggaatcccttctgcagcaccgttttagagctagaaatagcaagttaaaataaggctagtccgttatcaacttgaaaaagtggcaccgagtcggtgcggaaaagcgatcaaggtgctgcagaagggatctcgaggcggggctcgttggtctaggggtatgattctcgctttgggtgcgagaggtcccgggttcaaatcccggacgagccccgcctcgtttt

SEQ ID NO: 3909 - RNA, 225 nt, synthetic construct
  misc_feature 1..225: note = Synthetic
  misc_feature 126..127: note = UGG P1 ext 8 linker 8 may be inserted between bases
  source 1..225: mol_type = other RNA
ggaatcccttctgcagcaccgttttagagctagaaatagcaagttaaaataaggctagtccgttatcaacttgaaaaagtggcaccgagtcggtgcggaaaagcgatcaaggtgctgcagaagggatctctctccgaggcggggctcgttggtctaggggtatgattctcgctttgggtgcgagaggtcccgggttcaaatcccggacgagccccgcctcgtttt

SEQ ID NO: 3910 - RNA, 226 nt, synthetic construct
  misc_feature 1..226: note = Synthetic
  misc_feature 126..127: note = UGG P1 ext 11 linker 3 may be inserted between bases
  source 1..226: mol_type = other RNA
ggaatcccttctgcagcaccgttttagagctagaaatagcaagttaaaataaggctagtccgttatcaacttgaaaaagtggcaccgagtcggtgcggaaaagcgatcaaggtgctgcagaagggatctgctcgaggcggggctcgttggtctaggggtatgattctcgctttgggtgcgagaggtcccgggttcaaatcccggacgagccccgcctcgagctttt

SEQ ID NO: 3911 - RNA, 231 nt, synthetic construct
  misc_feature 1..231: note = Synthetic
  misc_feature 126..127: note = UGG P1 ext 11 linker 8 may be inserted between bases
  source 1..231: mol_type = other RNA
ggaatcccttctgcagcaccgttttagagctagaaatagcaagttaaaataaggctagtccgttatcaacttgaaaaagtggcaccgagtcggtgcggaaaagcgatcaaggtgctgcagaagggatctctctcgctcgaggcggggctcgttggtctaggggtatgattctcgctttgggtgcgagaggtcccgggttcaaatcccggacgagccccgcctcgagctttt

SEQ ID NO: 3912 - skipped

SEQ ID NO: 3913 - DNA, 217 bp, synthetic construct
  misc_feature 1..217: note = Synthetic
  misc_feature 126..127: note = UGG P1 ext 5 linker 3 may be inserted between bases
  source 1..217: mol_type = other DNA
  modified_base 214..217: mod_base = OTHER; note = Uracil
  modified_base 196: mod_base = OTHER; note = Uracil
  modified_base 190..191: mod_base = OTHER; note = Uracil
  modified_base 183: mod_base = OTHER; note = Uracil
  modified_base 174: mod_base = OTHER; note = Uracil
  modified_base 168..170: mod_base = OTHER; note = Uracil
  modified_base 164: mod_base = OTHER; note = Uracil
  modified_base 161..162: mod_base = OTHER; note = Uracil
  modified_base 158: mod_base = OTHER; note = Uracil
  modified_base 156: mod_base = OTHER; note = Uracil
  modified_base 150: mod_base = OTHER; note = Uracil
  modified_base 148: mod_base = OTHER; note = Uracil
  modified_base 144..145: mod_base = OTHER; note = Uracil
  modified_base 141: mod_base = OTHER; note = Uracil
  modified_base 132: mod_base = OTHER; note = Uracil
  modified_base 130: mod_base = OTHER; note = Uracil
ggcccagactgagcacgtgagttttagagctagaaatagcaagttaaaataaggctagtccgttatcaacttgaaaaagtggcaccgagtcggtgctctgccatcaaagcttcgaccgtgctcagtctgtctggcggggctcgttggtctaggggtatgattctcgctttgggtgcgagaggtcccgggttcaaatcccggacgagccccgcctttt

SEQ ID NO: 3914 - RNA, 229 nt, synthetic construct
  misc_feature 1..229: note = Synthetic
  misc_feature 167..168: note = partial CGG tRNA linker 8 may be inserted between bases
  source 1..229: mol_type = other RNA
ggcccagactgagcacgtgagttttagagctagaaatagcaagttaaaataaggctagtccgttatcaacttgaaaaagtggcaccgagtcggtgctggaggaagcagggcttcctttcctctgccatcacttatcgtcgtcatccttgtaatccgtgctcagtctgtctctctctggtctaggggtatgattctcgcttcgggtgcgagaggtcccgggttcaatttt

SEQ ID NO: 3915 - RNA, 255 nt, synthetic construct
  misc_feature 1..255: note = Synthetic
  misc_feature 167..168: note = UGG P1 ext 5 linker 3 may be inserted between bases
  source 1..255: mol_type = other RNA
ggcccagactgagcacgtgagttttagagctagaaatagcaagttaaaataaggctagtccgttatcaacttgaaaaagtggcaccgagtcggtgctggaggaagcagggcttcctttcctctgccatcacttatcgtcgtcatccttgtaatccgtgctcagtctgtctggcggggctcgttggtctaggggtatgattctcgctttgggtgcgagaggtcccgggttcaaatcccggacgagccccgcctttt

SEQ ID NO: 3916 - RNA, 260 nt, synthetic construct
  misc_feature 1..260: note = Synthetic
  misc_feature 167..168: note = UGG P1 ext 5 linker 8 may be inserted between bases
  source 1..260: mol_type = other RNA
ggcccagactgagcacgtgagttttagagctagaaatagcaagttaaaataaggctagtccgttatcaacttgaaaaagtggcaccgagtcggtgctggaggaagcagggcttcctttcctctgccatcacttatcgtcgtcatccttgtaatccgtgctcagtctgtctctctcggcggggctcgttggtctaggggtatgattctcgctttgggtgcgagaggtcccgggttcaaatcccggacgagccccgcctttt

SEQ ID NO: 3917 - RNA, 266 nt, synthetic construct
  misc_feature 1..266: note = Synthetic
  misc_feature 167..168: note = UGG P1 ext 8 linker 8 may be inserted between bases
  source 1..266: mol_type = other RNA
ggcccagactgagcacgtgagttttagagctagaaatagcaagttaaaataaggctagtccgttatcaacttgaaaaagtggcaccgagtcggtgctggaggaagcagggcttcctttcctctgccatcacttatcgtcgtcatccttgtaatccgtgctcagtctgtctctctccgaggcggggctcgttggtctaggggtatgattctcgctttgggtgcgagaggtcccgggttcaaatcccggacgagccccgcctcgtttt

SEQ ID NO: 3918 - RNA, 272 nt, synthetic construct
  misc_feature 1..272: note = Synthetic
  misc_feature 167..168: note = UGG P1 ext 11 linker 8 may be inserted between bases
  source 1..272: mol_type = other RNA
ggcccagactgagcacgtgagttttagagctagaaatagcaagttaaaataaggctagtccgttatcaacttgaaaaagtggcaccgagtcggtgctggaggaagcagggcttcctttcctctgccatcacttatcgtcgtcatccttgtaatccgtgctcagtctgtctctctcgctcgaggcggggctcgttggtctaggggtatgattctcgctttgggtgcgagaggtcccgggttcaaatcccggacgagccccgcctcgagctttt

SEQ ID NO: 3919 - RNA, 278 nt, synthetic construct
  misc_feature 1..278: note = Synthetic
  misc_feature 167..168: note = UGG P1 ext 14 linker 8 may be inserted between bases
  source 1..278: mol_type = other RNA
ggcccagactgagcacgtgagttttagagctagaaatagcaagttaaaataaggctagtccgttatcaacttgaaaaagtggcaccgagtcggtgctggaggaagcagggcttcctttcctctgccatcacttatcgtcgtcatccttgtaatccgtgctcagtctgtctctctcggtgctcgaggcggggctcgttggtctaggggtatgattctcgctttgggtgcgagaggtcccgggttcaaatcccggacgagccccgcctcgagcacctttt

SEQ ID NO: 3920 - RNA, 206 nt, synthetic construct
  misc_feature 1..206: note = Synthetic
  misc_feature 122..123: note = tRNA-Pro{CGG}-5 may be inserted between bases
  source 1..206: mol_type = other RNA
gtcatcttagtcattacctggttttagagctagaaatagcaagttaaaataaggctagtccgttatcaacttgaaaaagtggcaccgagtcggtgcgaacacctcatgtaatgactaagatgtctggcggggctcgttggtctaggggtatgattctcgcttcgggtgcgagaggtcccgggttcaaatcccggacgagccccgcc

SEQ ID NO: 3921 - RNA, 216 nt, synthetic construct
  misc_feature 1..216: note = Synthetic
  misc_feature 122..123: note = tRNA-Pro{CGG}-8 may be inserted between bases
  source 1..216: mol_type = other RNA
gtcatcttagtcattacctggttttagagctagaaatagcaagttaaaataaggctagtccgttatcaacttgaaaaagtggcaccgagtcggtgcgaacacctcatgtaatgactaagatgtctcgaggcggggctcgttggtctaggggtatgattctcgcttcgggtgcgagaggtcccgggttcaaatcccggacgagccccgcctcgtttt

SEQ ID NO: 3922 - RNA, 222 nt, synthetic construct
  misc_feature 1..222: note = Synthetic
  misc_feature 122..123: note = tRNA-Pro{CGG}-11 may be inserted between bases
  source 1..222: mol_type = other RNA
gtcatcttagtcattacctggttttagagctagaaatagcaagttaaaataaggctagtccgttatcaacttgaaaaagtggcaccgagtcggtgcgaacacctcatgtaatgactaagatgtctgctcgaggcggggctcgttggtctaggggtatgattctcgcttcgggtgcgagaggtcccgggttcaaatcccggacgagccccgcctcgagctttt

SEQ ID NO: 3923 - RNA, 211 nt, synthetic construct
  misc_feature 1..211: note = Synthetic
  misc_feature 122..123: note = tRNA-Pro{Lys}-5 may be inserted between bases
  source 1..211: mol_type = other RNA
gtcatcttagtcattacctggttttagagctagaaatagcaagttaaaataaggctagtccgttatcaacttgaaaaagtggcaccgagtcggtgcgaacacctcatgtaatgactaagatgtctggcgggcccggatagctcagtcggtagagcatcagacttttaatctgagggtccagggttcaagtccctgttcgggcccgcctttt

SEQ ID NO: 3924 - RNA, 217 nt, synthetic construct
  misc_feature 1..217: note = Synthetic
  misc_feature 122..123: note = tRNA-Pro{Lys}-8 may be inserted between bases
  source 1..217: mol_type = other RNA
gtcatcttagtcattacctggttttagagctagaaatagcaagttaaaataaggctagtccgttatcaacttgaaaaagtggcaccgagtcggtgcgaacacctcatgtaatgactaagatgtctcgaggcgggcccggatagctcagtcggtagagcatcagacttttaatctgagggtccagggttcaagtccctgttcgggcccgcctcgtttt

SEQ ID NO: 3925 - RNA, 216 nt, synthetic construct
  misc_feature 1..216: note = Synthetic
  misc_feature 122..123: note = tRNA-Pro{UGG}-8 may be inserted between bases
  source 1..216: mol_type = other RNA
gtcatcttagtcattacctggttttagagctagaaatagcaagttaaaataaggctagtccgttatcaacttgaaaaagtggcaccgagtcggtgcgaacacctcatgtaatgactaagatgtctcgaggcggggctcgttggtctaggggtatgattctcgctttgggtgcgagaggtcccgggttcaaatcccggacgagccccgcctcgtttt

SEQ ID NO: 3926 - RNA, 222 nt, synthetic construct
  misc_feature 1..222: note = Synthetic
  misc_feature 122..123: note = tRNA-Pro{UGG}-11 may be inserted between bases
  source 1..222: mol_type = other RNA
gtcatcttagtcattacctggttttagagctagaaatagcaagttaaaataaggctagtccgttatcaacttgaaaaagtggcaccgagtcggtgcgaacacctcatgtaatgactaagatgtctgctcgaggcggggctcgttggtctaggggtatgattctcgctttgggtgcgagaggtcccgggttcaaatcccggacgagccccgcctcgagctttt

SEQ ID NO: 3927 - RNA, 221 nt, synthetic construct
  misc_feature 1..221: note = Synthetic
  misc_feature 122..123: note = tRNA-Pro{UGG}-8-longer linker may be inserted between bases
  source 1..221: mol_type = other RNA
gtcatcttagtcattacctggttttagagctagaaatagcaagttaaaataaggctagtccgttatcaacttgaaaaagtggcaccgagtcggtgcgaacacctcatgtaatgactaagatgtctctctccgaggcggggctcgttggtctaggggtatgattctcgctttgggtgcgagaggtcccgggttcaaatcccggacgagccccgcctcgtttt

SEQ ID NO: 3928 - RNA, 227 nt, synthetic construct
  misc_feature 1..227: note = Synthetic
  misc_feature 122..123: note = tRNA-Pro{UGG}-11-longer linker may be inserted between bases
  source 1..227: mol_type = other RNA
gtcatcttagtcattacctggttttagagctagaaatagcaagttaaaataaggctagtccgttatcaacttgaaaaagtggcaccgagtcggtgcgaacacctcatgtaatgactaagatgtctctctcgctcgaggcggggctcgttggtctaggggtatgattctcgctttgggtgcgagaggtcccgggttcaaatcccggacgagccccgcctcgagctttt

SEQ ID NO: 3929 - RNA, 233 nt, synthetic construct
  misc_feature 1..233: note = Synthetic
  misc_feature 122..123: note = tRNA-Pro{UGG}-14-longer linker may be inserted between bases
  source 1..233: mol_type = other RNA
gtcatcttagtcattacctggttttagagctagaaatagcaagttaaaataaggctagtccgttatcaacttgaaaaagtggcaccgagtcggtgcgaacacctcatgtaatgactaagatgtctctctcggtgctcgaggcggggctcgttggtctaggggtatgattctcgctttgggtgcgagaggtcccgggttcaaatcccggacgagccccgcctcgagcacctttt

SEQ ID NO: 3930-3933 - skipped (4 entries)

SEQ ID NO: 3934 - protein, 11 aa, synthetic construct
  REGION 1..11: note = Synthetic
RQRRNELKRSF

SEQ ID NO: 3935 - protein, 38 aa, synthetic construct
  REGION 1..38: note = Synthetic
NQSSNFGPMKGGNFGGRSSGPYGGGGQYFAKPRNQGGY

SEQ ID NO: 3936 - protein, 16 aa, Rattus norvegicus
  REGION 3..12: note = misc_feature - Xaa can be any naturally occurring amino acid
KRXXXXXXXXXXKKKL

SEQ ID NO: 3937 - protein, 345 aa, Homo sapiens
MPARALLPRRMGHRTLASTPALWASIPCPRSELRLDLVLPSGQSFRWREQSPAHWSGVLADQVWTLTQTEEQLHCTVYRGDKSQASRPTPDELEAVRKYFQLDVTLAQLYHHWGSVDSHFQEVAQKFQGVRLLRQDPIECLFSFICSSNNNIARITGMVERLCQAFGPRLIQLDDVTYHGFPSLQALAGPEVEAHLRKLGLGYRARYVSASARAILEEQGGLAWLQQLRESSYEEAHKALCILPGVGTKVADCICLMALDKPQAVPVDVHMWHIAQRDYSWHPTTSQAKGPSPQTNKELGNFFRSLWGPYAGWAQAVLFSADLRQSRHAQEPPAKRRKGSKGPEG

SEQ ID NO: 3938 - protein, 298 aa, Homo sapiens
MVTPALQMKKPKQFCRRMGQKKQRPARAGQPHSSSDAAQAPAEQPHSSSDAAQAPCPRERCLGPPTTPGPYRSIYFSSPKGHLTRLGLEFFDQPAVPLARAFLGQVLVRRLPNGTELRGRIVETEAYLGPEDEAAHSRGGRQTPRNRGMFMKPGTLYVYIIYGMYFCMNISSQGDGACVLLRALEPLEGLETMRQLRSTLRKGTASRVLKDRELCSGPSKLCQALAINKSFDQRDLAQDEAVWLERGPLEPSEPAVVAAARVGVGHAGEWARKPLRFYVRGSPWVSVVDRVAEQDTQA

SEQ ID NO: 3939 - DNA, 10 bp, synthetic construct
  misc_feature 1..10: note = Synthetic
  misc_feature 5..6: note = may be non-consecutive
  source 1..10: mol_type = other DNA
gttttaaaac

SEQ ID NO: 3940 - protein, 240 aa, synthetic construct
  REGION 1..240: note = Synthetic
MANLGCWMLVLFVATWSDLGLCKKRPKPGGWNTGGSRYPGQGSPGGNRYPPQGGGGWGQPHGGGWGQPHGGGWGQPHGGGWGQPHGGGWGQGGGTHSQWNKPSKPKTNMKHMAGAAAAGAVVGGLGGYMLGSAMSRPIIHFGSDYEDRYYRENMHRYPNQVYYRPMDEYSNQNNFVHNCVNITIKQHTVTTTTKGENFTETDVKMMERVVEQMCITQYERESQAYYQRGSSMVLFSSPPV

SEQ ID NO: 3941 - protein, 240 aa, synthetic construct
  REGION 1..240: note = Synthetic
MANLGCWMLVLFVATWSDLGLCKKRPKPGGWNTGGSRYPGQGSPGGNRYPPQGGGGWGQPHGGGWGQPHGGGWGQPHGGGWGQPHGGGWGQGGGTHSQWNKPSKPKTNMKHMAGAAAAGAVVGGLGGYMLGSAMSRPIIHFGSDYEDRYYRENMHRYPNQVYYRPMDEYSNQNNFVHDCVNITIKQHKVTTTTKGENFTETDVKMMERVVEQMCITQYERESQAYYQRGSSMVLFSSPPV

SEQ ID NO: 3942 - protein, 240 aa, synthetic construct
  REGION 1..240: note = Synthetic
MANLGCWMLVLFVATWSDLGLCKKRPKPGGWNTGGSRYPGQGSPGGNRYPPQGGGGWGQPHGGGWGQPHGGGWGQPHGGGWGQPHGGGWGQGGGTHSQWNKPSKPKTNMKHMAGAAAAGAVVGGLGGYMLGSAMSRPIIHFGSDYEDRYYRENMHRYPNQVYYRPMDEYSNQNNFVHDCVNITIKQHTVTTTTKGKNFTETDVKMMERVVEQMCITQYERESQAYYQRGSSMVLFSSPPV

SEQ ID NO: 3943 - protein, 240 aa, synthetic construct
  REGION 1..240: note = Synthetic
MANLGCWMLVLFVATWSDLGLCKKRPKPGGWNTGGSRYPGQGSPGGNRYPPQGGGGWGQPHGGGWGQPHGGGWGQPHGGGWGQPHGGGWGQGGGTHSQWNKPSKPKTNMKHMAGAAAAGAVVGGLGGYMLGSAMSRPIIHFGSDYEDRYYRENMHRYPNQVYYRPMDEYSNQNNFVHDCVNITIKQHTVTTTTKGENFTKTDVKMMERVVEQMCITQYERESQAYYQRGSSMVLFSSPPV

SEQ ID NO: 3944 - protein, 240 aa, synthetic construct
  REGION 1..240: note = Synthetic
MANLGCWMLVLFVATWSDLGLCKKRPKPGGWNTGGSRYPGQGSPGGNRYPPQGGGGWGQPHGGGWGQPHGGGWGQPHGGGWGQPHGGGWGQGGGTHSQWNKPSKPKTNMKHMAGAAAAGAVVGGLGGYMLGSAMSRPIIHFGSDYEDRYYRENMHRYPNQVYYRPMDEYSNQNNFVHDCVNITIKQHTVTTTTKGENFTETDIKMMERVVEQMCITQYERESQAYYQRGSSMVLFSSPPV

SEQ ID NO: 3945 - protein, 240 aa, synthetic construct
  REGION 1..240: note = Synthetic
MANLGCWMLVLFVATWSDLGLCKKRPKPGGWNTGGSRYPGQGSPGGNRYPPQGGGGWGQPHGGGWGQPHGGGWGQPHGGGWGQPHGGGWGQGGGTHSQWNKPSKPKTNMKHMAGAAAAGAVVGGLGGYMLGSAMSRPIIHFGSDYEDRYYRENMHRYPNQVYYRPMDEYSNQNNFVHDCVNITIKQHTVTTTTKGENFTETDVKMMEHVVEQMCITQYERESQAYYQRGSSMVLFSSPPV

SEQ ID NO: 3946 - protein, 240 aa, synthetic construct
  REGION 1..240: note = Synthetic
MANLGCWMLVLFVATWSDLGLCKKRPKPGGWNTGGSRYPGQGSPGGNRYPPQGGGGWGQPHGGGWGQPHGGGWGQPHGGGWGQPHGGGWGQGGGTHSQWNKPSKPKTNMKHMAGAAAAGAVVGGLGGYMLGSAMSRPIIHFGSDYEDRYYRENMHRYPNQVYYRPMDEYSNQNNFVHDCVNITIKQHTVTTTTKGENFTETDVKMMERVIEQMCITQYERESQAYYQRGSSMVLFSSPPV

SEQ ID NO: 3947 - protein, 240 aa, synthetic construct
  REGION 1..240: note = Synthetic
MANLGCWMLVLFVATWSDLGLCKKRPKPGGWNTGGSRYPGQGSPGGNRYPPQGGGGWGQPHGGGWGQPHGGGWGQPHGGGWGQPHGGGWGQGGGTHSQWNKPSKPKTNMKHMAGAAAAGAVVGGLGGYMLGSAMSRPIIHFGSDYEDRYYRENMHRYPNQVYYRPMDEYSNQNNFVHDCVNITIKQHTVTTTTKGENFTETDVKMMERVVQQMCITQYERESQAYYQRGSSMVLFSSPPV

SEQ ID NO: 3948 - protein, 240 aa, synthetic construct
  REGION 1..240: note = Synthetic
MANLGCWMLVLFVATWSDLGLCKKRPKPGGWNTGGSRYPGQGSPGGNRYPPQGGGGWGQPHGGGWGQPHGGGWGQPHGGGWGQPHGGGWGQGGGTHSQWNKPSKPKTNMKHMAGAAAAGAVVGGLGGYMLGSAMSRPIIHFGSDYEDRYYRENMHRYPNQVYYRPMDEYSNQNNFVHDCVNITIKQHTVTTTTKGENFTETDVKMMERVVEQMCITQYERESQAYYQRGSSRVLFSSPPV

SEQ ID NO: 3949 - protein, 240 aa, synthetic construct
  REGION 1..240: note = Synthetic
MANLGCWMLVLFVATWSDLGLCKKRPKPGGWNTGGSRYPGQGSPGGNRYPPQGGGGWGQPHGGGWGQPHGGGWGQPHGGGWGQPHGGGWGQGGGTHSQWNKLSKPKTNMKHMAGAAAAGAVVGGLGGYMLGSAMSRPIIHFGSDYEDRYYRENMHRYPNQVYYRPMDEYSNQNNFVHDCVNITIKQHTVTTTTKGENFTETDVKMMERVVEQMCITQYERESQAYYQRGSSMVLFSSPPV

SEQ ID NO: 3950 - protein, 240 aa, synthetic construct
  REGION 1..240: note = Synthetic
MANLGCWMLVLFVATWSDLGLCKKRPKPGGWNTGGSRYPGQGSPGGNRYPPQGGGGWGQPHGGGWGQPHGGGWGQPHGGGWGQPHGGGWGQGGGTHSQWNKPSKLKTNMKHMAGAAAAGAVVGGLGGYMLGSAMSRPIIHFGSDYEDRYYRENMHRYPNQVYYRPMDEYSNQNNFVHDCVNITIKQHTVTTTTKGENFTETDVKMMERVVEQMCITQYERESQAYYQRGSSMVLFSSPPV

SEQ ID NO: 3951 - protein, 240 aa, synthetic construct
  REGION 1..240: note = Synthetic
MANLGCWMLVLFVATWSDLGLCKKRPKPGGWNTGGSRYPGQGSPGGNRYPPQGGGGWGQPHGGGWGQPHGGGWGQPHGGGWGQPHGGGWGQGGGTHSQWNKPSKPKTNMKHMAGAAVAGAVVGGLGGYMLGSAMSRPIIHFGSDYEDRYYRENMHRYPNQVYYRPMDEYSNQNNFVHDCVNITIKQHTVTTTTKGENFTETDVKMMERVVEQMCITQYERESQAYYQRGSSMVLFSSPPV

SEQ ID NO: 3952 - protein, 240 aa, synthetic construct
  REGION 1..240: note = Synthetic
MANLGCWMLVLFVATWSDLGLCKKRPKPGGWNTGGSRYPGQGSPGGNRYPPQGGGGWGQPHGGGWGQPHGGGWGQPHGGGWGQPHGGGWGQGGGTHSQWNKPSKPKTNMKHMAGAAAAGAVVGGLGGYMLVSAMSRPIIHFGSDYEDRYYRENMHRYPNQVYYRPMDEYSNQNNFVHDCVNITIKQHTVTTTTKGENFTETDVKMMERVVEQMCITQYERESQAYYQRGSSMVLFSSPPV

SEQ ID NO: 3953 - protein, 240 aa, synthetic construct
  REGION 1..240: note = Synthetic
MANLGCWMLVLFVATWSDLGLCKKRPKPGGWNTGGSRYPGQGSPGGNRYPPQGGGGWGQPHGGGWGQPHGGGWGQPHGGGWGQPHGGGWGQGGGTHSQWNKPSKPKTNMKHMAGAAAAGAVVGGLGGYMLGSAMSRPIIHFGSDYEDRYYRENMHRYPNQVYYRPMDEYSNQNNFGHDCVNITIKQHTVTTTTKGENFTETDVKMMERVVEQMCITQYERESQAYYQRGSSMVLFSSPPV

SEQ ID NO: 3954 - protein, 240 aa, synthetic construct
  REGION 1..240: note = Synthetic
MANLGCWMLVLFVATWSDLGLCKKRPKPGGWNTGGSRYPGQGSPGGNRYPPQGGGGWGQPHGGGWGQPHGGGWGQPHGGGWGQPHGGGWGQGGGTHSQWNKPSKPKTNMKHMAGAAAAGAVVGGLGGYMLGSAMSRPIIHFGSDYEDRYYRENMHRYPNQVYYRPMDEYSNQNNFVHDCVNITIKQRTVTTTTKGENFTETDVKMMERVVEQMCITQYERESQAYYQRGSSMVLFSSPPV

SEQ ID NO: 3955 - protein, 240 aa, synthetic construct
  REGION 1..240: note = Synthetic
MANLGCWMLVLFVATWSDLGLCKKRPKPGGWNTGGSRYPGQGSPGGNRYPPQGGGGWGQPHGGGWGQPHGGGWGQPHGGGWGQPHGGGWGQGGGTHSQWNKPSKPKTNMKHMAGAAAAGAVVGGLGGYMLGSAMSRPIIHFGSDYEDRYYRENMHRYPNQVYYRPMDEYSNQNNFVHDCVNITIKQHTVTTTTKGENSTETDVKMMERVVEQMCITQYERESQAYYQRGSSMVLFSSPPV

SEQ ID NO: 3956 - protein, 240 aa, synthetic construct
  REGION 1..240: note = Synthetic
MANLGCWMLVLFVATWSDLGLCKKRPKPGGWNTGGSRYPGQGSPGGNRYPPQGGGGWGQPHGGGWGQPHGGGWGQPHGGGWGQPHGGGWGQGGGTHSQWNKPSKPKTNMKHMAGAAAAGAVVGGLGGYMLGSAMSRPIIHFGSDYEDRYYRENMHRYPNQVYYRPMDEYSNQNNFVHDCVNITIKQHTVTTTTKGENFTETNVKMMERVVEQMCITQYERESQAYYQRGSSMVLFSSPPV

SEQ ID NO: 3957 - protein, 240 aa, synthetic construct
  REGION 1..240: note = Synthetic
MANLGCWMLVLFVATWSDLGLCKKRPKPGGWNTGGSRYPGQGSPGGNRYPPQGGGGWGQPHGGGWGQPHGGGWGQPHGGGWGQPHGGGWGQGGGTHSQWNKPSKPKTNMKHMAGAAAAGAVVGGLGGYMLGSAMSRPIIHFGSDYEDRYYRENMHRYPNQVYYRPMDEYSNQNNFVHDCVNITIKQHTVTTTTKGENFTETDVKMMERVVEPMCITQYERESQAYYQRGSSMVLFSSPPV

SEQ ID NO: 3958 - protein, 240 aa, synthetic construct
  REGION 1..240: note = Synthetic
MANLGCWMLVLFVATWSDLGLCKKRPKPGGWNTGGSRYPGQGSPGGNRYPPQGGGGWGQPHGGGWGQPHGGGWGQPHGGGWGQPHGGGWGQGGGTHSQWNKPSKPKTNMKHMAGAAAAGAVVGGLGGYMLGSAMSRPIIHFGSDYEDRYYRENMHRYPNQVYYRPMDEYSNQNNFVHDCVNITIKQHTVTTTTKGENFTETDVKMMERVVEQMCITRYERESQAYYQRGSSMVLFSSPPV

SEQ ID NO: 3959 - protein, 240 aa, synthetic construct
  REGION 1..240: note = Synthetic
MANLGCWMLVLFVATWSDLGLCKKRPKPGGWNTGGSRYPGQGSPGGNRYPPQGGGGWGQPHGGGWGQPHGGGWGQPHGGGWGQPHGGGWGQGGGTHSQWNKPSKPKTNMKHMAGAAAAGAVVGGLGGYMLGSAMSRPIIHFGSDYEDRYYRENMHRYPNQVYYRPMDEYSNQNNFVHDCVNITIKQHTVTTTTKGENFTETDVKMMERVVEQMCITQYERESQAYYQRGSSTVLFSSPPV

SEQ ID NO: 3960 - protein, 240 aa, synthetic construct
  REGION 1..240: note = Synthetic
MANLGCWMLVLFVATWSDLGLCKKRPKPGGWNTGGSRYPGQGSPGGNRYPPQGGGGWGQPHGGGWGQPHGGGWGQPHGGGWGQPHGGGWGQGGGTHSQWNKPSKPKTNMKHMAGAAAAGAVVGGLGSYMLGSAMSRPIIHFGSDYEDRYYRENMHRYPNQVYYRPMDEYSNQNNFVHDCVNITIKQHTVTTTTKGENFTETDVKMMERVVEQMCITQYERESQAYYQRGSSMVLFSSPPV

SEQ ID NO: 3961 - protein, 240 aa, synthetic construct
  REGION 1..240: note = Synthetic
MANLGCWMLVLFVATWSDLGLCKKRPKPGGWNTGGSRYPGQGSPGGNRYPPQGGGGWGQPHGGGWGQPHGGGWGQPHGGGWGQPHGGGWGQGGGTHSQWNKPSKPKTNMKHMAGAAAAGAVVGGLGVYMLGSAMSRPIIHFGSDYEDRYYRENMHRYPNQVYYRPMDEYSNQNNFVHDCVNITIKQHTVTTTTKGENFTETDVKMMERVVEQMCITQYERESQAYYQRGSSMVLFSSPPV

SEQ ID NO: 3962 - protein, 240 aa, synthetic construct
  REGION 1..240: note = Synthetic
MANLGCWMLVLFVATWSDLGLCKKRPKPGGWNTGGSRYPGQGSPGGNRYPPQGGGGWGQPHGGGWGQPHGGGWGQPHGGGWGQPHGGGWGQGGGTHSQWNKPSKPKTNMKHMAGAAAAGAVVGGLGGYVLGSAMSRPIIHFGSDYEDRYYRENMHRYPNQVYYRPMDEYSNQNNFVHDCVNITIKQHTVTTTTKGENFTETDVKMMERVVEQMCITQYERESQAYYQRGSSMVLFSSPPV

SEQ ID NO: 3963 - protein, 240 aa, synthetic construct
  REGION 1..240: note = Synthetic
MANLGCWMLVLFVATWSDLGLCKKRPKPGGWNTGGSRYPGQGSPGGNRYPPQGGGGWGQPHGGGWGQPHGGGWGQPHGGGWGQPHGGGWGQGGGTHSQWNKPSKPKTNMKHMAGAAAAGAVVGGLGGYMLGSAMSRPIIHFGSDYEDRYYRENMHRYPNQVYYRPMGEYSNQNNFVHDCVNITIKQHTVTTTTKGENFTETDVKMMERVVEQMCITQYERESQAYYQRGSSMVLFSSPPV

SEQ ID NO: 3964 - protein, 240 aa, synthetic construct
  REGION 1..240: note = Synthetic
MANLGCWMLVLFVATWSDLGLCKKRPKPGGWNTGGSRYPGQGSPGGNRYPPQGGGGWGQPHGGGWGQPHGGGWGQPHGGGWGQPHGGGWGQGGGTHSQWNKPSKPKTNMKHMAGAAAAGAVVGGLGGYMLGSAMSRPIIHFGSDYEDRYYRENMHRYPNQVYYRPMNEYSNQNNFVHDCVNITIKQHTVTTTTKGENFTETDVKMMERVVEQMCITQYERESQAYYQRGSSMVLFSSPPV

SEQ ID NO: 3965 - protein, 240 aa, synthetic construct
  REGION 1..240: note = Synthetic
MANLGCWMLVLFVATWSDLGLCKKRPKPGGWNTGGSRYPGQGSPGGNRYPPQGGGGWGQPHGGGWGQPHGGGWGQPHGGGWGQPHGGGWGQGGGTHSQWNKPSKPKTNMKHMAGAAAAGAVVGGLGGYMLGSAMSRPIIHFGSDYEDRYYRENMHRYPNQVYYRPMDEYSSQNNFVHDCVNITIKQHTVTTTTKGENFTETDVKMMERVVEQMCITQYERESQAYYQRGSSMVLFSSPPV

SEQ ID NO: 3966 - protein, 240 aa, synthetic construct
  REGION 1..240: note = Synthetic
MANLGCWMLVLFVATWSDLGLCKKRPKPGGWNTGGSRYPGQGSPGGNRYPPQGGGGWGQPHGGGWGQPHGGGWGQPHGGGWGQPHGGGWGQGGGTHSQWNKPSKPKTNMKHMAGAAAAGAVVGGLGGYMLGSAMSRPIIHFGSDYEDRYYRENMHRYPNQVYYRPMDEYSNQNNFVHDCVNITIKQHTVTTTTKGENFTETDVKMMERVVEQMCITQYKRESQAYYQRGSSMVLFSSPPV

SEQ ID NO: 3967 - protein, 240 aa, synthetic construct
  REGION 1..240: note = Synthetic
MANLGCWMLVLFVATWSDLGLCKKRPKPGGWNTGGSRYPGQGSPGGNRYPPQGGGGWGQPHGGGWGQPHGGGWGQPHGGGWGQPHGGGWGQGGGTHSQWNKPSKPKTNMKHMAGAAAAGAVVGGLGGYMLGSAMSRPIIHFGSDYEDRYYRENMHRYPNQVYYRPMDEYSNQNNFVHDCVNITIKQHTVTTTTKGENFTETDVKMMERVVEQMCITQYERESQAYYQRGSSMVLFSSSPV

SEQ ID NO: 3968 - protein, 5 aa, synthetic construct
  REGION 1..5: note = Synthetic
EAAAK

SEQ ID NO: 3969 - protein, 10 aa, synthetic construct
  REGION 1..10: note = Synthetic
EAAAKEAAAK

SEQ ID NO: 3970 - protein, 15 aa, synthetic construct
  REGION 1..15: note = Synthetic
EAAAKEAAAKEAAAK

SEQ ID NO: 3971 - DNA, 3163 bp, synthetic construct
  misc_feature 1..3163: note = Synthetic
  misc_feature 589..590: note = Csy4 loop may be inserted between bases
  misc_feature 609..610: note = spacer may be inserted between bases
  misc_feature 629..630: note = scaffold may be inserted between bases
  misc_feature 705..706: note = template may be inserted between bases
  misc_feature 739..740: note = insert may be inserted between bases
  misc_feature 848..849: note = PBS may be inserted between bases
  misc_feature 860..861: note = linker may be inserted between bases
  misc_feature 863..864: note = MASC ENE may be inserted between bases
  misc_feature 1034..1035: note = unrelated plasmid sequence may be inserted between bases
  misc_feature 1067..1068: note = Ubc promoter may be inserted between bases
  misc_feature 2304..2305: note = Csy4 and NLS may be inserted between bases
  misc_feature 2919..2920: note = SV40 terminator may be inserted between bases
  source 1..3163: mol_type = other DNA
tagttattaatagtaatcaattacggggtcattagttcatagcccatatatggagttccgcgttacataacttacggtaaatggcccgcctggctgaccgcccaacgacccccgcccattgacgtcaataatgacgtatgttcccatagtaacgccaatagggactttccattgacgtcaatgggtggagtatttacggtaaactgcccacttggcagtacatcaagtgtatcatatgccaagtacgccccctattgacgtcaatgacggtaaatggcccgcctggcattatgcccagtacatgaccttatgggactttcctacttggcagtacatctacgtattagtcatcgctattaccatggtgatgcggttttggcagtacatcaatgggcgtggatagcggtttgactcacggggatttccaagtctccaccccattgacgtcaatgggagtttgttttggcaccaaaatcaacgggactttccaaaatgtcgtaacaactccgccccattgacgcaaatgggcggtaggcgtgtacggtgggaggtctatataagcagagctggtttagtgaaccgtcagatcgttcactgccgtataggcagggcccagactgagcacgtgagttttagagctagaaatagcaagttaaaataaggctagtccgttatcaacttgaaaaagtgggaccgagtcggtcctggaggaagcagggcttcctttcctctgccatcaaaatttctttccatcttcaagcatcccggtgtagtgcaccacgcaggtctggccgcgcttggggaaggtgcgcccgtctcctggggagatggtttccacctgcactcccgtgctcagtctgttttagggtcatgaaggtttttcttttcctgagaaaacaacacgtattgttttctcaggttttgctttttggcctttttctagcttaaaaaaaaaaaaagcaaaagatgctggtggttggcactcctggtttccaggacggggttcaaatccctgcggcgtctttgctttgacttttttttaagcttgggccgctcgaggtagcagcggcctccgcgccgggttttggcgcctcccgcgggcgcccccctcctcacggcgagcgctgccacgtcagacgaagggcgcaggagcgttcctgatccttccgcccggacgctcaggacagcggcccgctgctcataagactcggccttagaaccccagtatcagcagaaggacattttaggacgggacttgggtgactctagggcactggttttctttccagagagcggaacaggcgaggaaaagtagtcccttctcggcgattctgcggagggatctccgtggggcggtgaacgccgatgattatataaggacgcgccgggtgtggcacagctagttccgtcgcagccgggatttgggtcgcggttcttgtttgtggatcgctgtgatcgtcacttggtgagttgcgggctgctgggctggccggggctttcgtggccgccgggccgctcggtgggacggaagcgtgtggagagaccgccaagggctgtagtctgggtccgcgagcaaggttgccctgaactgggggttggggggagcgcacaaaatggcggctgttcccgagtcttgaatggaagacgcttgtaaggcgggctgtgaggtcgttgaaacaaggtggggggcatggtgggcggcaagaacccaaggtcttgaggccttcgctaatgcgggaaagctcttattcgggtgagatgggctggggcaccatctggggaccctgacgtgaagtttgtcactgactggagaactcgggtttgtcgtctggttgcgggggcggcagttatgcggtgccgttgggcagtgcacccgtacctttgggagcgcgcgcctcgtcgtgtcgtgacgtcacccgttctgttggcttataatgcagggtggggccacctgccggtaggtgtgcggtaggcttttctccgtcgcaggacgcagggttcgggcctagggtaggctctcctgaatcgacaggcgccggacctctggtgaggggagggataagtgaggcgtcagtttctttggtcggttttatgtacctatcttcttaagtagctgaagctccggttttgaactatgcgctcggggttggcgagtgtgttttgtgaagttttttaggcaccttttgaaatgtaatcatttgggtcaatatgtaattttcagtgttagactagtaaattgtccgctaaattctggccgtttttggcttttttgttagacaggatccccgggtaccggtcgccaccatgggctcttttactatggaccactacctggatattagactgagacctgaccctgagttcccacccgcccagctgatgagcgtgctgttcggcaagctgcaccaggccctggtggcacagggaggcgaccggatcggcgtgagcttccccgacctggatgagagcagatccaggctgggagagcgcctgaggatccacgcatccgccgacgatctgcgcgccctgctggcccggccatggctggagggcctgcgcgaccacctgcagtttggagagccagcagtggtgccacaccctaccccatacaggcaggtgtccagggtgcaggcaaagtctaaccctgagcggctgcggagaaggctgatgcgccggcacgatctgtctgaggaggaggccagaaagaggatccccgacaccgtggccagaacactggatctgcctttcgtgaccctgcggagccagagcacaggccagcacttcagactgtttatcaggcacggcccactgcaggtgacagccgaggaaggaggattcacttgttacggactgtctaaaggaggattcgtgccctggttcagcagcctgaggcctcctaagaagaagaggaaggtttaatgatcataatcaagccatatcacatctgtagaggtttacttgctttaaaaaacctccacacctccccctgaacctgaaacataaaatgaatgcaattgttgttgttaacttgtttattgcagcttataatggttacaaataaagcaatagcatcacaaatttcacaaataaagcatttttttcactgcattctagttgtggtttgtccaaactcatcaatgtatcttatcatgtctggatctgc

SEQ ID NO: 3972 - RNA, 126 nt, synthetic construct
  misc_feature 1..126: note = Synthetic
  misc_feature 20..21: note = scaffold may be inserted between bases
  misc_feature 96..97: note = template and PBS may be inserted between bases
  misc_feature 122..123: note = terminal motif may be inserted between bases
  source 1..126: mol_type = other RNA
ggcccagactgagcacgtgagttttagagctagaaatagcaagttaaaataaggctagtccgttatcaacttgaaaaagtggcaccgagtcggtgctctgccatcaaagcgtgctcagtctgtttt

SEQ ID NO: 3973 - RNA, 122 nt, synthetic construct
  misc_feature 1..122: note = Synthetic
  misc_feature 20..21: note = scaffold may be inserted between bases
  misc_feature 96..97: note = template and PBS may be inserted between bases
  source 1..122: mol_type = other RNA
ggcccagactgagcacgtgagttttagagctagaaatagcaagttaaaataaggctagtccgttatcaacttgaaaaagtggcaccgagtcggtgctctgccatcaaagcgtgctcagtctg

SEQ ID NO: 3974 - RNA, 153 nt, synthetic construct
  misc_feature 1..153: note = Synthetic
  misc_feature 20..21: note = scaffold may be inserted between bases
  misc_feature 96..97: note = template and PBS may be inserted between bases
  misc_feature 122..123: note = terminal motif may be inserted between bases
  source 1..153: mol_type = other RNA
ggcccagactgagcacgtgagttttagagctagaaatagcaagttaaaataaggctagtccgttatcaacttgaaaaagtggcaccgagtcggtgctctgccatcaaagcgtgctcagtctgtttgctcgaggcggaaacgcctcgagctttt

SEQ ID NO: 3975 - RNA, 149 nt, synthetic construct
  misc_feature 1..149: note = Synthetic
  misc_feature 20..21: note = scaffold may be inserted between bases
  misc_feature 96..97: note = template and PBS may be inserted between bases
  misc_feature 122..123: note = terminal motif may be inserted between bases
  source 1..149: mol_type = other RNA
ggcccagactgagcacgtgagttttagagctagaaatagcaagttaaaataaggctagtccgttatcaacttgaaaaagtggcaccgagtcggtgctctgccatcaaagcgtgctcagtctgtttgctcgaggcggaaacgcctcgagc

SEQ ID NO: 3976 - RNA, 163 nt, synthetic construct
  misc_feature 1..163: note = Synthetic
  misc_feature 20..21: note = scaffold may be inserted between bases
  misc_feature 96..97: note = template and PBS may be inserted between bases
  misc_feature 122..123: note = terminal motif may be inserted between bases
  source 1..163: mol_type = other RNA
ggcccagactgagcacgtgagttttagagctagaaatagcaagttaaaataaggctagtccgttatcaacttgaaaaagtggcaccgagtcggtgctctgccatcaaagcgtgctcagtctgtttgctcgaggcgtacgcgaaagcgtacgcctcgagctttt

SEQ ID NO: 3977 - RNA, 159 nt, synthetic construct
  misc_feature 1..159: note = Synthetic
  misc_feature 20..21: note = scaffold may be inserted between bases
  misc_feature 96..97: note = template and PBS may be inserted between bases
  misc_feature 122..123: note = terminal motif may be inserted between bases
  source 1..159: mol_type = other RNA
ggcccagactgagcacgtgagttttagagctagaaatagcaagttaaaataaggctagtccgttatcaacttgaaaaagtggcaccgagtcggtgctctgccatcaaagcgtgctcagtctgtttgctcgaggcgtacgcgaaagcgtacgcctcgagc

SEQ ID NO: 3978 - RNA, 173 nt, synthetic construct
  misc_feature 1..173: note = Synthetic
  misc_feature 20..21: note = scaffold may be inserted between bases
  misc_feature 96..97: note = template and PBS may be inserted between bases
  misc_feature 122..123: note = terminal motif may be inserted between bases
  source 1..173: mol_type = other RNA
ggcccagactgagcacgtgagttttagagctagaaatagcaagttaaaataaggctagtccgttatcaacttgaaaaagtggcaccgagtcggtgctctgccatcaaagcgtgctcagtctgtttgctcgaggcgtacgcccgatgaaaatcgggcgtacgcctcgagctttt

SEQ ID NO: 3979 - RNA, 152 nt, synthetic construct
  misc_feature 1..152: note = Synthetic
  misc_feature 20..21: note = scaffold may be inserted between bases
  misc_feature 96..97: note = template and PBS may be inserted between bases
  misc_feature 122..123: note = terminal motif may be inserted between bases
  source 1..152: mol_type = other RNA
ggcccagactgagcacgtgagttttagagctagaaatagcaagttaaaataaggctagtccgttatcaacttgaaaaagtggcaccgagtcggtgctctgccatcaaagcgtgctcagtctgttttggggttggggttggggttggggtttt

SEQ ID NO: 3980 - RNA, 140 nt, synthetic construct
  misc_feature 1..140: note = Synthetic
  misc_feature 20..21: note = scaffold may be inserted between bases
  misc_feature 96..97: note = template and PBS may be inserted between bases
  misc_feature 122..123: note = terminal motif may be inserted between bases
  source 1..140: mol_type = other RNA
ggcccagactgagcacgtgagttttagagctagaaatagcaagttaaaataaggctagtccgttatcaacttgaaaaagtggcaccgagtcggtgctctgccatcaaagcgtgctcagtctgtttggtggtggtggtttt

SEQ ID NO: 3981 - RNA, 130 nt, synthetic construct
  misc_feature 1..130: note = Synthetic
  misc_feature 20..21: note = scaffold may be inserted between bases
  misc_feature 100..101: note = template and PBS may be inserted between bases
  misc_feature 126..127: note = terminal motif may be inserted between bases
  source 1..130: mol_type = other RNA
ggcccagactgagcacgtgagttttagagctagcgaaagctagcaagttaaaataaggctagtccgttatcaacttgaaaaagtgggaccgagtcggtcctctgccatcaaagcgtgctcagtctgtttt

SEQ ID NO: 3982 - RNA, 134 nt, synthetic construct
  misc_feature 1..134: note = Synthetic
  misc_feature 20..21: note = scaffold may be inserted between bases
  misc_feature 104..105: note = template and PBS may be inserted between bases
  misc_feature 134: note = terminal motif may be inserted between bases
  source 1..134: mol_type = other RNA
ggcccagactgagcacgtgagttttagagctagctcgaaagagctagcaagttaaaataaggctagtccgttatcaacttgaaaaagtgggaccgagtcggtcctctgccatcaaagcgtgctcagtctgtttt

SEQ ID NO: 3983 - RNA, 138 nt, synthetic construct
  misc_feature 1..138: note = Synthetic
  misc_feature 20..21: note = scaffold may be inserted between bases
  misc_feature 108..109: note = template and PBS may be inserted between bases
  misc_feature 134..135: note = terminal motif may be inserted between bases
  source 1..138: mol_type = other RNA
ggcccagactgagcacgtgagttttagagctagctcatgaaaatgagctagcaagttaaaataaggctagtccgttatcaacttgaaaaagtgggaccgagtcggtcctctgccatcaaagcgtgctcagtctgtttt

SEQ ID NO: 3984 - RNA, 142 nt, synthetic construct
  misc_feature 1..142: note = Synthetic
  misc_feature 20..21: note = scaffold may be inserted between bases
  misc_feature 112..113: note = template and PBS may be inserted between bases
  misc_feature 138..139: note = terminal motif may be inserted between bases
  source 1..142: mol_type = other RNA
ggcccagactgagcacgtgagttttagagctagctcatccgaaaggatgagctagcaagttaaaataaggctagtccgttatcaacttgaaaaagtgggaccgagtcggtcctctgccatcaaagcgtgctcagtctgtttt

SEQ ID NO: 3985 - RNA, 146 nt, synthetic construct
  misc_feature 1..146: note = Synthetic
  misc_feature 20..21: note = scaffold may be inserted between bases
  misc_feature 116..117: note = template and PBS may be inserted between bases
  misc_feature 142..143: note = terminal motif may be inserted between bases
  source 1..146: mol_type = other RNA
ggcccagactgagcacgtgagttttagagctagctcatcctggaaacaggatgagctagcaagttaaaataaggctagtccgttatcaacttgaaaaagtgggaccgagtcggtcctctgccatcaaagcgtgctcagtctgtttt

SEQ ID NO: 3986 - RNA, 126 nt, synthetic construct
  misc_feature 1..126: note = Synthetic
  misc_feature 20..21: note = scaffold may be inserted between bases
  misc_feature 96..97: note = template and PBS may be inserted between bases
  misc_feature 122..123: note = terminal motif may be inserted between bases
  source 1..126: mol_type = other RNA
ggcccagactgagcacgtgagtttgagagctagaaatagcaagtttaaataaggctagtccgttatcaacttgaaaaagtgggaccgagtcggtcctctgccatcaaagcgtgctcagtctgtttt

SEQ ID NO: 3987 - RNA, 138 nt, synthetic construct
  misc_feature 1..138: note = Synthetic
  misc_feature 20..21: note = scaffold may be inserted between bases
  misc_feature 108..109: note = template and PBS may be inserted between bases
  misc_feature 134..135: note = terminal motif may be inserted between bases
  source 1..138: mol_type = other RNA
ggcccagactgagcacgtgagtttgagagctagctcatgaaaatgagctagcaagtttaaataaggctagtccgttatcaacttgaaaaagtgggaccgagtcggtcctctgccatcaaagcgtgctcagtctgtttt

SEQ ID NO: 3988 - RNA, 134 nt, synthetic construct
  misc_feature 1..134: note = Synthetic
  misc_feature 20..21: note = scaffold may be inserted between bases
  misc_feature 96..97: note = template and PBS may be inserted between bases
  misc_feature 130..131: note = terminal motif may be inserted between bases
  source 1..134: mol_type = other RNA
ggcccagactgagcacgtgagttttagagctagaaatagcaagttaaaataaggctagtccgttatcaacttgaaaaagtggcaccgagtcggtgctctgccatcagacgaaagcctcgtgctcagtctgtttt

SEQ ID NO: 3989 - RNA, 127 nt, synthetic construct
  misc_feature 1..127: note = Synthetic
  misc_feature 28..29: note = spacer may be inserted between bases
  misc_feature 96..97: note = scaffold may be inserted between bases
  misc_feature 122..123: note = template, PBS and terminal motif may be inserted between bases
  source 1..127: mol_type = other RNA
gcagacctaagtggtgacatatggtctggcccagactgagcacgtgagttttagagctatacgtagcaagttaaaataaggctagtccgttatcaactttacgaagtgggaccgagtcggtcctttt

SEQ ID NO: 3990 - RNA, 68 nt, synthetic construct
  misc_feature 1..68: note = Synthetic
  source 1..68: mol_type = other RNA
ggccggcatggtcccagcctcctcgctggcgccggctgggcaacatgcttcggcatggcgaatgggac

SEQ ID NO: 3991 - DNA, 20 bp, synthetic construct
  misc_feature 1..20: note = Synthetic
  source 1..20: mol_type = other DNA
ccttgataccaacctgccca

SEQ ID NO: 3992 - DNA, 126 bp, synthetic construct
  misc_feature 1..126: note = Synthetic
  source 1..126: mol_type = other DNA
catggtgcacctgactcctggttttagagctagaaatagcaagttaaaataaggctagtccgttatcaacttgaaaaagtggcaccgagtcggtgcagacttctcttcaggagtcaggtgcacttt

SEQ ID NO: 3993 - protein, 1030 aa, Homo sapiens
MKIPNIGNVMNKFEILGVVGEGAYGVVLKCRHKETHEIVAIKKFKDSEENEEVKETTLRELKMLRTLKQENIVELKEAFRRRGKLYLVFEYVEKNMLELLEEMPNGVPPEKVKSYIYQLIKAIHWCHKNDIVHRDIKPENLLISHNDVLKLCDFGFARNLSEGNNANYTEYVATRWYRSPELLLGAPYGKSVDMWSVGCILGELSDGQPLFPGESEIDQLFTIQKVLGPLPSEQMKLFYSNPRFHGLRFPAVNHPQSLERRYLGILNSVLLDLMKNLLKLDPADRYLTEQCLNHPTFQTQRLLDRSPSRSAKRKPYHVESSTLSNRNQAGKSTALQSHHRSNSKDIQNLSVGLPRADEGLPANESFLNGNLAGASLSPLHTKTYQASSQPGSTSKDLTNNNIPHLLSPKEAKSKTEFDFNIDPKPSEGPGTKYLKSNSRSQQNRHSFMESSQSKAGTLQPNEKQSRHSYIDTIPQSSRSPSYRTKAKSHGALSDSKSVSNLSEARAQIAEPSTSRYFPSSCLDLNSPTSPTPTRHSDTRTLLSPSGRNNRNEGTLDSRRTTTRHSKTMEELKLPEHMDSSHSHSLSAPHESFSYGLGYTSPFSSQQRPHRHSMYVTRDKVRAKGLDGSLSIGQGMAARANSLQLLSPQPGEQLPPEMTVARSSVKETSREGTSSFHTRQKSEGGVYHDPHSDDGTAPKENRHLYNDPVPRRVGSFYRVPSPRPDNSFHENNVSTRVSSLPSESSSGTNHSKRQPAFDPWKSPENISHSEQLKEKEKQGFFRSMKKKKKKSQTVPNSDSPDLLTLQKSIHSASTPSSRPKEWRPEKISDLQTQSQPLKSLRKLLHLSSASNHPASSDPRFQPLTAQQTKNSFSEIRIHPLSQASGGSSNIRQEPAPKGRPALQLPDGGCDGRRQRHHSGPQDRRFMLRTTEQQGEYFCCGDPKKPHTPCVPNRALHRPISSPAPYPVLQVRGTSMCPTLQVRGTDAFSCPTQQSGFSFFVRHVMREALIHRAQVNQAALLTYHENAALTGK

SEQ ID NO: 3994 - protein, 960 aa, Homo sapiens
MKIPNIGNVMNKFEILGVVGEGAYGVVLKCRHKETHEIVAIKKFKDSEENEEVKETTLRELKMLRTLKQENIVELKEAFRRRGKLYLVFEYVEKNMLELLEEMPNGVPPEKVKSYIYQLIKAIHWCHKNDIVHRDIKPENLLISHNDVLKLCDFGFARNLSEGNNANYTEYVATRWYRSPELLLGAPYGKSVDMWSVGCILGELSDGQPLFPGESEIDQLFTIQKVLGPLPSEQMKLFYSNPRFHGLRFPAVNHPQSLERRYLGILNSVLLDLMKNLLKLDPADRYLTEQCLNHPTFQTQRLLDRSPSRSAKRKPYHVESSTLSNRNQAGKSTALQSHHRSNSKDIQNLSVGLPRADEGLPANESFLNGNLAGASLSPLHTKTYQASSQPGSTSKDLTNNNIPHLLSPKEAKSKTEFDFNIDPKPSEGPGTKYLKSNSRSQQNRHSFMESSQSKAGTLQPNEKQSRHSYIDTIPQSSRSPSYRTKAKSHGALSDSKSVSNLSEARAQIAEPSTSRYFPSSCLDLNSPTSPTPTRHSDTRTLLSPSGRNNRNEGTLDSRRTTTRHSKTMEELKLPEHMDSSHSHSLSAPHESFSYGLGYTSPFSSQQRPHRHSMYVTRDKVRAKGLDGSLSIGQGMAARANSLQLLSPQPGEQLPPEMTVARSSVKETSREGTSSFHTRQKSEGGVYHDPHSDDGTAPKENRHLYNDPVPRRVGSFYRVPSPRPDNSFHENNVSTRVSSLPSESSSGTNHSKRQPAFDPWKSPENISHSEQLKEKEKQGFFRSMKKKKKKSQTVPNSDSPDLLTLQKSIHSASTPSSRPKEWRPEKISDLQTQSQPLKSLRKLLHLSSASNHPASSDPRFQPLTAQQTKNSFSEIRIHPLSQASGGSSNIRQEPAPKGRPALQLPGQMDPGWHVSSVTRSATEGPSYSEQLGAKSGPNGHPYNRTNRSRMPNLNDLKETAL

SEQ ID NO: 3995 - DNA, 62 bp, synthetic construct
  misc_feature 1..62: note = Synthetic
  source 1..62: mol_type = other DNA
ggagtcaagctcacggatgtggcccctgtargcttctttcttgtgctggatgtagtctacct

SEQ ID NO: 3996 - DNA, 20 bp, synthetic construct
  misc_feature 1..20: note = Synthetic
  source 1..20: mol_type = other DNA
aagctcacggatgtggcccc

SEQ ID NO: 3997-3998 - skipped (2 entries)

SEQ ID NO: 3999 - DNA, 10 bp, synthetic construct
  misc_feature 1..10: note = Synthetic
  source 1..10: mol_type = other DNA
atgtggcccc

SEQ ID NO: 4000 - DNA, 11 bp, synthetic construct
  misc_feature 1..11: note = Synthetic
  source 1..11: mol_type = other DNA
gatgtggcccc

SEQ ID NO: 4001 - DNA, 12 bp, synthetic construct
  misc_feature 1..12: note = Synthetic
  source 1..12: mol_type = other DNA
ggatgtggcccc

SEQ ID NO: 4002 - DNA, 13 bp, synthetic construct
  misc_feature 1..13: note = Synthetic
  source 1..13: mol_type = other DNA
cggatgtggcccc

SEQ ID NO: 4003 - DNA, 14 bp, synthetic construct
  misc_feature 1..14: note = Synthetic
  source 1..14: mol_type = other DNA
acggatgtggcccc

SEQ ID NO: 4004 - DNA, 15 bp, synthetic construct
  misc_feature 1..15: note = Synthetic
  source 1..15: mol_type = other DNA
cacggatgtggcccc

SEQ ID NO: 4005 - DNA, 16 bp, synthetic construct
  misc_feature 1..16: note = Synthetic
  source 1..16: mol_type = other DNA
tcacggatgtggcccc

SEQ ID NO: 4006 - DNA, 17 bp, synthetic construct
  misc_feature 1..17: note = Synthetic
  source 1..17: mol_type = other DNA
ctcacggatgtggcccc

SEQ ID NO: 4007 - DNA, 12 bp, synthetic construct
  misc_feature 1..12: note = Synthetic
  source 1..12: mol_type = other DNA
aagaagcttaca

SEQ ID NO: 4008 - DNA, 13 bp, synthetic construct
  misc_feature 1..13: note = Synthetic
  source 1..13: mol_type = other DNA
aaagaagcttaca

SEQ ID NO: 4009 - DNA, 14 bp, synthetic construct
  misc_feature 1..14: note = Synthetic
  source 1..14: mol_type = other DNA
gaaagaagcttaca

SEQ ID NO: 4010 - DNA, 15 bp, synthetic construct
  misc_feature 1..15: note = Synthetic
  source 1..15: mol_type = other DNA
agaaagaagcttaca

SEQ ID NO: 4011 - DNA, 16 bp, synthetic construct
  misc_feature 1..16: note = Synthetic
  source 1..16: mol_type = other DNA
aagaaagaagcttaca

SEQ ID NO: 4012 - DNA, 17 bp, synthetic construct
  misc_feature 1..17: note = Synthetic
  source 1..17: mol_type = other DNA
caagaaagaagcttaca

SEQ ID NO: 4013 - DNA, 18 bp, synthetic construct
  misc_feature 1..18: note = Synthetic
  source 1..18: mol_type = other DNA
acaagaaagaagcttaca

SEQ ID NO: 4014 - DNA, 19 bp, synthetic construct
  misc_feature 1..19: note = Synthetic
  source 1..19: mol_type = other DNA
cacaagaaagaagcttaca

SEQ ID NO: 4015 - DNA, 20 bp, synthetic construct
  misc_feature 1..20: note = Synthetic
  source 1..20: mol_type = other DNA
gcacaagaaagaagcttaca

SEQ ID NO: 4016 - DNA, 21 bp, synthetic construct
  misc_feature 1..21: note = Synthetic
  source 1..21: mol_type = other DNA
agcacaagaaagaagcttaca

SEQ ID NO: 4017 - DNA, 22 bp, synthetic construct
  misc_feature 1..22: note = Synthetic
  source 1..22: mol_type = other DNA
cagcacaagaaagaagcttaca

SEQ ID NO: 4018 - DNA, 23 bp, synthetic construct
  misc_feature 1..23: note = Synthetic
  source 1..23: mol_type = other DNA
ccagcacaagaaagaagcttaca

SEQ ID NO: 4019 - DNA, 24 bp, synthetic construct
  misc_feature 1..24: note = Synthetic
  source 1..24: mol_type = other DNA
tccagcacaagaaagaagcttaca

SEQ ID NO: 4020 - DNA, 25 bp, synthetic construct
  misc_feature 1..25: note = Synthetic
  source 1..25: mol_type = other DNA
atccagcacaagaaagaagcttaca

SEQ ID NO: 4021 - DNA, 20 bp, synthetic construct
  misc_feature 1..20: note = Synthetic
  source 1..20: mol_type = other DNA
gctttgattcgtacacgagg

SEQ ID NO: 4022 - DNA, 20 bp, synthetic construct
  misc_feature 1..20: note = Synthetic
  source 1..20: mol_type = other DNA
gctggaggagaagctaaaca

SEQ ID NO: 4023-4024 - skipped (2 entries)

SEQ ID NO: 4025 - DNA, 10 bp, synthetic construct
  misc_feature 1..10: note = Synthetic
  source 1..10: mol_type = other DNA
gagaagctaa

SEQ ID NO: 4026 - DNA, 11 bp, synthetic construct
  misc_feature 1..11: note = Synthetic
  source 1..11: mol_type = other DNA
ggagaagctaa

SEQ ID NO: 4027 - DNA, 12 bp, synthetic construct
  misc_feature 1..12: note = Synthetic
  source 1..12: mol_type = other DNA
aggagaagctaa

SEQ ID NO: 4028 - DNA, 13 bp, synthetic construct
  misc_feature 1..13: note = Synthetic
  source 1..13: mol_type = other DNA
gaggagaagctaa

SEQ ID NO: 4029 - DNA, 14 bp, synthetic construct
  misc_feature 1..14: note = Synthetic
  source 1..14: mol_type = other DNA
ggaggagaagctaa

SEQ ID NO: 4030 - DNA, 15 bp, synthetic construct
  misc_feature 1..15: note = Synthetic
  source 1..15: mol_type = other DNA
tggaggagaagctaa

SEQ ID NO: 4031 - DNA, 16 bp, synthetic construct
  misc_feature 1..16: note = Synthetic
  source 1..16: mol_type = other DNA
ctggaggagaagctaa

SEQ ID NO: 4032 - DNA, 17 bp, synthetic construct
  misc_feature 1..17: note = Synthetic
  source 1..17: mol_type = other DNA
gctggaggagaagctaa

SEQ ID NO: 4033-4035 - skipped (3 entries)

SEQ ID NO: 4036 - DNA, 10 bp, synthetic construct
  misc_feature 1..10: note = Synthetic
  source 1..10: mol_type = other DNA
ttgagaatgt

SEQ ID NO: 4037 - DNA, 11 bp, synthetic construct
  misc_feature 1..11: note = Synthetic
  source 1..11: mol_type = other DNA
gttgagaatgt

SEQ ID NO: 4038 - DNA, 12 bp, synthetic construct
  misc_feature 1..12: note = Synthetic
  source 1..12: mol_type = other DNA
tgttgagaatgt

SEQ ID NO: 4039 - DNA, 13 bp, synthetic construct
  misc_feature 1..13: note = Synthetic
  source 1..13: mol_type = other DNA
ttgttgagaatgt

SEQ ID NO: 4040 - DNA, 14 bp, synthetic construct
  misc_feature 1..14: note = Synthetic
  source 1..14: mol_type = other DNA
attgttgagaatgt

SEQ ID NO: 4041 - DNA, 15 bp, synthetic construct
  misc_feature 1..15: note = Synthetic
  source 1..15: mol_type = other DNA
tattgttgagaatgt

SEQ ID NO: 4042 - DNA, 16 bp, synthetic construct
  misc_feature 1..16: note = Synthetic
  source 1..16: mol_type = other DNA
ttattgttgagaatgt

SEQ ID NO: 4043 - DNA, 17 bp, synthetic construct
  misc_feature 1..17: note = Synthetic
  source 1..17: mol_type = other DNA
attattgttgagaatgt

SEQ ID NO: 4044 - DNA, 18 bp, synthetic construct
  misc_feature 1..18: note = Synthetic
  source 1..18: mol_type = other DNA
aattattgttgagaatgt

SEQ ID NO: 4045 - DNA, 19 bp, synthetic construct
  misc_feature 1..19: note = Synthetic
  source 1..19: mol_type = other DNA
taattattgttgagaatgt

SEQ ID NO: 4046 - DNA, 20 bp, synthetic construct
  misc_feature 1..20: note = Synthetic
  source 1..20: mol_type = other DNA
ataattattgttgagaatgt

SEQ ID NO: 4047 - DNA, 20 bp, synthetic construct
  misc_feature 1..20: note = Synthetic
  source 1..20: mol_type = other DNA
cctgtggtcacagttcttgg

SEQ ID NO: 4048 - DNA, 20 bp, synthetic construct
  misc_feature 1..20: note = Synthetic
  source 1..20: mol_type = other DNA
ccacagggcagggcagccac

SEQ ID NO: 4049 - DNA, 25 bp, synthetic construct
  misc_feature 1..25: note = Synthetic
  source 1..25: mol_type = other DNA
attctcaacaataattataagattc

SEQ ID NO: 4050 - DNA, 20 bp, synthetic construct
  misc_feature 1..20: note = Synthetic
  source 1..20: mol_type = other DNA
tctcaacaataagattctgc

SEQ ID NO: 4051-4052 - skipped (2 entries)

SEQ ID NO: 4053 - DNA, 10 bp, synthetic construct
  misc_feature 1..10: note = Synthetic
  source 1..10: mol_type = other DNA
cattctcaac

SEQ ID NO: 4054 - DNA, 11 bp, synthetic construct
  misc_feature 1..11: note = Synthetic
  source 1..11: mol_type = other DNA
acattctcaac

SEQ ID NO: 4055 - DNA, 12 bp, synthetic construct
  misc_feature 1..12: note = Synthetic
  source 1..12: mol_type = other DNA
aacattctcaac

SEQ ID NO: 4056 - DNA, 13 bp, synthetic construct
  misc_feature 1..13: note = Synthetic
  source 1..13: mol_type = other DNA
aaacattctcaac

SEQ ID NO: 4057 - DNA, 14 bp, synthetic construct
  misc_feature 1..14: note = Synthetic
  source 1..14: mol_type = other DNA
taaacattctcaac

SEQ ID NO: 4058 - DNA, 15 bp, synthetic construct
  misc_feature 1..15: note = Synthetic
  source 1..15: mol_type = other DNA
ctaaacattctcaac

SEQ ID NO: 4059 - DNA, 16 bp, synthetic construct
  misc_feature 1..16: note = Synthetic
  source 1..16: mol_type = other DNA
gctaaacattctcaac

SEQ ID NO: 4060 - DNA, 17 bp, synthetic construct
  misc_feature 1..17: note = Synthetic
  source 1..17: mol_type = other DNA
agctaaacattctcaac

SEQ ID NO: 4061 - DNA, 15 bp, synthetic construct
  misc_feature 1..15: note = Synthetic
  source 1..15: mol_type = other DNA
aatcttataattatt

SEQ ID NO: 4062 - DNA, 16 bp, synthetic construct
  misc_feature 1..16: note = Synthetic
  source 1..16: mol_type = other DNA
gaatcttataattatt

SEQ ID NO: 4063 - DNA, 17 bp, synthetic construct
  misc_feature 1..17: note = Synthetic
  source 1..17: mol_type = other DNA
agaatcttataattatt

SEQ ID NO: 4064 - DNA, 18 bp, synthetic construct
  misc_feature 1..18: note = Synthetic
  source 1..18: mol_type = other DNA
cagaatcttataattatt

SEQ ID NO: 4065 - DNA, 19 bp, synthetic construct
  misc_feature 1..19: note = Synthetic
  source 1..19: mol_type = other DNA
gcagaatcttataattatt

SEQ ID NO: 4066 - DNA, 20 bp, synthetic construct
  misc_feature 1..20: note = Synthetic
  source 1..20: mol_type = other DNA
tgcagaatcttataattatt

SEQ ID NO: 4067 - DNA, 21 bp, synthetic construct
  misc_feature 1..21: note = Synthetic
  source 1..21: mol_type = other DNA
ctgcagaatcttataattatt

SEQ ID NO: 4068 - DNA, 22 bp, synthetic construct
  misc_feature 1..22: note = Synthetic
  source 1..22: mol_type = other DNA
cctgcagaatcttataattatt

SEQ ID NO: 4069 - DNA, 23 bp, synthetic construct
  misc_feature 1..23: note = Synthetic
  source 1..23: mol_type = other DNA
gcctgcagaatcttataattatt

SEQ ID NO: 4070 - DNA, 24 bp, synthetic construct
  misc_feature 1..24: note = Synthetic
  source 1..24: mol_type = other DNA
cgcctgcagaatcttataattatt

SEQ ID NO: 4071 - DNA, 25 bp, synthetic construct
  misc_feature 1..25: note = Synthetic
  source 1..25: mol_type = other DNA
ccgcctgcagaatcttataattatt

SEQ ID NO: 4072 - DNA, 26 bp, synthetic construct
  misc_feature 1..26: note = Synthetic
  source 1..26: mol_type = other DNA
tccgcctgcagaatcttataattatt

SEQ ID NO: 4073 - DNA, 27 bp, synthetic construct
  misc_feature 1..27: note = Synthetic
  source 1..27: mol_type = other DNA
gtccgcctgcagaatcttataattatt

SEQ ID NO: 4074 - DNA, 28 bp, synthetic construct
  misc_feature 1..28: note = Synthetic
  source 1..28: mol_type = other DNA
ggtccgcctgcagaatcttataattatt

SEQ ID NO: 4075 - DNA, 15 bp, synthetic construct
  misc_feature 1..15: note = Synthetic
  source 1..15: mol_type = other DNA
aaaaaaaaaaaaaaa

SEQ ID NO: 4076 - DNA, 12 bp, synthetic construct
  misc_feature 1..12: note = Synthetic
  source 1..12: mol_type = other DNA
gggggggggggg

SEQ ID NO: 4077 - DNA, 12 bp, synthetic construct
  misc_feature 1..12: note = Synthetic
  source 1..12: mol_type = other DNA
cccccccccccc

SEQ ID NO: 4078 - DNA, 15 bp, synthetic construct
  misc_feature 1..15: note = Synthetic
  source 1..15: mol_type = other DNA
gtaatgactaagatg

SEQ ID NO: 4079 - DNA, 14 bp, synthetic construct
  misc_feature 1..14: note = Synthetic
  source 1..14: mol_type = other DNA
aacgaacaccgcag

SEQ ID NO: 4080 - DNA, 76 bp, synthetic construct
  misc_feature 1..76: note = Synthetic
  misc_feature 16..17: note = n is 5,6-dihydrouridine
  misc_feature 39: note = n is pseudouridine
  misc_feature 55: note = n is pseudouridine
  source 1..76: mol_type = other DNA
  modified_base 68..69: mod_base = OTHER; note = Uracil
  modified_base 59: mod_base = OTHER; note = Uracil
  modified_base 52: mod_base = OTHER; note = Uracil
  modified_base 50: mod_base = OTHER; note = Uracil
  modified_base 47: mod_base = OTHER; note = Uracil
  modified_base 41: mod_base = OTHER; note = Uracil
  modified_base 33: mod_base = OTHER; note = Uracil
  modified_base 12: mod_base = OTHER; note = Uracil
  modified_base 6..8: mod_base = OTHER; note = Uracil
gcggatttagctcagnngggagagcgccagactgaayanctggaggtcctgtgtncgatccacagaattcgcacca

SEQ ID NO: 4081 - DNA, 188 bp, synthetic construct
  misc_feature 1..188: note = Synthetic
  misc_feature 99..123: note = n is a, c, g, t or u
  misc_feature 137..138: note = n is 5,6-dihydrouridine
  misc_feature 158: note = n is pseudouridine
  misc_feature 174: note = n is pseudouridine
  source 1..188: mol_type = other DNA
  modified_base 185..188: mod_base = OTHER; note = Uracil
  modified_base 178: mod_base = OTHER; note = Uracil
  modified_base 171: mod_base = OTHER; note = Uracil
  modified_base 169: mod_base = OTHER; note = Uracil
  modified_base 166: mod_base = OTHER; note = Uracil
  modified_base 160: mod_base = OTHER; note = Uracil
  modified_base 152: mod_base = OTHER; note = Uracil
  modified_base 131: mod_base = OTHER; note = Uracil
  modified_base 126..127: mod_base = OTHER; note = Uracil
  modified_base 124: mod_base = OTHER; note = Uracil
  modified_base 96: mod_base = OTHER; note = Uracil
  modified_base 92: mod_base = OTHER; note = Uracil
  modified_base 82: mod_base = OTHER; note = Uracil
  modified_base 73..74: mod_base = OTHER; note = Uracil
  modified_base 68: mod_base = OTHER; note = Uracil
  modified_base 65..66: mod_base = OTHER; note = Uracil
  modified_base 61: mod_base = OTHER; note = Uracil
  modified_base 58: mod_base = OTHER; note = Uracil
  modified_base 52: mod_base = OTHER; note = Uracil
  modified_base 46..47: mod_base = OTHER; note = Uracil
  modified_base 39: mod_base = OTHER; note = Uracil
  modified_base 33: mod_base = OTHER; note = Uracil
  modified_base 24..27: mod_base = OTHER; note = Uracil
  modified_base 18..19: mod_base = OTHER; note = Uracil
  modified_base 15: mod_base = OTHER; note = Uracil
  modified_base 12: mod_base = OTHER; note = Uracil
  modified_base 9: mod_base = OTHER; note = Uracil
gaaggcaataatgctaattacagttttagagctagaaatagcaagttaaaataaggctagtccgttatcaacttgaaaaagtggcaccgagtcggtgcnnnnnnnnnnnnnnnnnnnnnnnnntcttagctcagggnngagagcgccagactaggyanctggaggtcctgtgtncgatccacagtttt

SEQ ID NO: 4082 - DNA, 20 bp, synthetic construct
  misc_feature 1..20: note = Synthetic
  source 1..20: mol_type = other DNA
gcagtggtggggggccttgg

SEQ ID NO: 4083 - DNA, 23 bp, synthetic construct
  misc_feature 1..23: note = Synthetic
  source 1..23: mol_type = other DNA
atgtagacgccaaggccccccac

SEQ ID NO: 4084 - protein, 240 aa, synthetic construct; identical to SEQ ID NO: 487
  REGION 1..240: note = Synthetic
